(19) United States
(12) Patent Application Publication
(10) Pub. No.: US 2024/0342308 A1
(43) Pub. Date: Oct. 17, 2024

(54) Methods and Compositions for Treating Conditions Involving the Eye

(71) Applicant: Krystal Biotech, Inc., Pittsburgh, PA (US)

(72) Inventors: Suma Krishnan, Pittsburgh, PA (US); Haley Nicole Cartwright, Pittsburgh, PA (US)

(21) Appl. No.: 18/634,382

(22) Filed: Apr. 12, 2024

Related U.S. Application Data
(60) Provisional application No. 63/459,102, filed on Apr. 13, 2023.
(60) Provisional application No. 63/460,948, filed on Apr. 21, 2023.
(60) Provisional application No. 63/593,085, filed on Oct. 25, 2023.

(51) Int. Cl. A61K 48/00; A61K 38/18; A61P 27/02; C12N 15/86

(52) U.S. Cl. CPC A61K 48/0033; A61K 38/185; A61K 48/0075; A61P 27/02; C12N 15/86; C12N 2710/16622; C12N 2710/16643; C12N 2710/16652; C12N 2710/16662

(57) ABSTRACT

The present disclosure provides recombinant nucleic acids comprising one or more polynucleotides encoding a polypeptide; viruses comprising the recombinant nucleic acids; compositions and formulations comprising the recombinant nucleic acids and/or viruses; methods of their use (e.g., for the treatment of one or more conditions or diseases of the eye); and articles of manufacture or kits thereof.

### CROSS REFERENCE TO RELATED APPLICATIONS

[0001] This application claims the priority benefit of U.S. Provisional Application Ser. No. 63/459,102, filed Apr. 13, 2023, U.S. Provisional Application Ser. No. 63/460,948, filed Apr. 21, 2023, and U.S. Provisional Application Ser. No. 63/593,085, filed Oct. 25, 2023, the contents of which are incorporated herein by reference in their entirety.

### SEQUENCE LISTING INFORMATION

[0002] The Sequence Listing associated with this application is filed in electronic format via Patent Center and is hereby incorporated by reference into the specification in its entirety. The name of the file containing the Sequence Listing is 2401989.xml. The size of the file is 1,738,822 bytes, and the file was created on Apr. 12, 2024.

### FIELD OF THE INVENTION

[0003] The present disclosure relates, in part, to recombinant nucleic acids comprising one or more polynucleotides encoding a polypeptide, viruses comprising the same, pharmaceutical compositions and formulations thereof, and methods of their use (e.g., for treating one or more conditions or diseases of the eye).

### BACKGROUND

[0004] Conditions of the eye, vision loss, eye disease, and/or vision disorders carry a significant economic burden with an annual estimated cost of about $139 billion in the U.S. Despite significant advances in clinical care and treatment methods, more effective therapeutic options are still needed.

[0005] All references cited herein, including patent applications, patent publications, non-patent literature, and NCBI/UniProtKB/Swiss-Prot Accession numbers are herein incorporated by reference in their entirety, as if each individual reference were specifically and individually indicated to be incorporated by reference.

### BRIEF SUMMARY

[0006] In order to meet these and other needs, provided herein are recombinant nucleic acids (e.g., recombinant herpes virus genomes) encoding one or more polypeptides, viruses (e.g., herpes viruses) comprising the recombinant nucleic acids (e.g., recombinant herpes virus genomes), pharmaceutical compositions and formulations, medicaments, and/or methods of administration (e.g., useful for treating an eye condition or disease) in a subject in need thereof.

[0007] Accordingly, certain aspects of the present disclosure relate to a recombinant herpes virus genome comprising one or more polynucleotides encoding a polypeptide. In some embodiments, the recombinant herpes virus genome comprises two or more polynucleotides encoding a polypeptide. In some embodiments, the recombinant herpes virus genome is replication competent. In some embodiments, the recombinant herpes virus genome is replication defective. In some embodiments that may be combined with any of the preceding embodiments, the recombinant herpes virus genome comprises the one or more polynucleotides encoding the polypeptide within one or more viral gene loci. In some embodiments that may be combined with any of the preceding embodiments, the recombinant herpes virus genome is selected from a recombinant herpes simplex virus genome, a recombinant varicella zoster virus genome, a recombinant human cytomegalovirus genome, a recombinant herpesvirus 6A genome, a recombinant herpesvirus 6B genome, a recombinant herpesvirus 7 genome, an Epstein-Barr virus genome, a recombinant Kaposi's sarcoma-associated herpesvirus genome, and any combinations or derivatives thereof.

[0008] In some embodiments that may be combined with any of the preceding embodiments, the recombinant herpes virus genome is a recombinant herpes simplex virus genome. In some embodiments, the recombinant herpes simplex virus genome is a recombinant type 1 herpes simplex virus (HSV-1) genome, a recombinant type 2 herpes simplex virus (HSV-2) genome, or any combinations or derivatives thereof. In some embodiments, the recombinant herpes simplex virus genome is a recombinant HSV-1 genome.

[0009] In some embodiments that may be combined with any of the preceding embodiments, the recombinant herpes simplex virus genome has been engineered to reduce or eliminate expression of one or more herpes simplex virus genes (e.g., one or more toxic herpes simplex virus genes). In some embodiments that may be combined with any of the preceding embodiments, the recombinant herpes simplex virus genome comprises an inactivating mutation. In some embodiments, the inactivating mutation is in a herpes simplex virus gene. In some embodiments, the inactivating mutation is a deletion of at least a portion of the coding sequence of the herpes simplex virus gene. In some embodiments, the inactivating mutation is a deletion of the coding sequence of the herpes simplex virus gene. In some embodiments, the herpes simplex virus gene is selected from Infected Cell Protein (ICP) 0 (one or both copies), ICP4 (one or both copies), ICP22, ICP27, ICP47, thymidine kinase (tk), Long Unique Region (UL) 41, and UL55. In some embodiments that may be combined with any of the preceding embodiments, the recombinant herpes simplex virus genome comprises an inactivating mutation in one or both copies of the ICP4 gene. In some embodiments that may be combined with any of the preceding embodiments, the recombinant herpes simplex virus genome comprises an inactivating mutation in the ICP22 gene. In some embodiments that may be combined with any of the preceding embodiments, the recombinant herpes simplex virus genome comprises an inactivating mutation in the UL41 gene. In some embodiments that may be combined with any of the preceding embodiments, the recombinant herpes simplex virus genome comprises an inactivating mutation in one or both copies of the ICP0 gene. In some embodiments that may be combined with any of the preceding embodiments, the recombinant herpes simplex virus genome comprises an inactivating mutation in the ICP27 gene. In some embodiments that may be combined with any of the preceding embodiments, the recombinant herpes simplex virus genome comprises an inactivating mutation in the UL55 gene. In some embodiments that may be combined with any of the preceding embodiments, the recombinant herpes simplex virus genome does not comprise an inactivating mutation in the ICP47 gene. In some embodiments, the recombinant herpes simplex virus genome does not comprise an inactivating mutation in one or both copies of the ICP34.5 gene. In some embodiments that may be combined with any of the preceding embodiments, the recombinant herpes simplex virus genome does not comprise an inactivating mutation in the UL36 gene.

[0010] In some embodiments that may be combined with any of the preceding embodiments, the recombinant herpes simplex virus genome comprises the one or more polynucleotides encoding the polypeptide within one or more viral gene loci. In some embodiments that may be combined with any of the preceding embodiments, the recombinant herpes simplex virus genome comprises the one or more polynucleotides encoding the polypeptide within one or both of the ICP4 viral gene loci. In some embodiments that may be combined with any of the preceding embodiments, the recombinant herpes simplex virus genome comprises the one or more polynucleotides encoding the polypeptide within the ICP22 viral gene locus. In some embodiments that may be combined with any of the preceding embodiments, the recombinant herpes simplex virus genome comprises the one or more polynucleotides encoding the polypeptide within the UL41 viral gene locus. In some embodiments that may be combined with any of the preceding embodiments, the recombinant herpes simplex virus genome comprises the one or more polynucleotides encoding the polypeptide within one or both of the ICP0 viral gene loci. In some embodiments that may be combined with any of the preceding embodiments, the recombinant herpes simplex virus genome comprises the one or more polynucleotides encoding the polypeptide within the ICP27 viral gene locus. In some embodiments that may be combined with any of the preceding embodiments, the recombinant herpes simplex virus genome comprises the one or more polynucleotides encoding the polypeptide within the UL55 viral gene locus.

[0011] In some embodiments that may be combined with any of the preceding embodiments, the polypeptide is a human polypeptide. In some embodiments that may be combined with any of the preceding embodiments, the polypeptide is selected from the group consisting of sterile alpha motif domain-containing protein 11, nephrocystin-4, espin, nicotinamide/nicotinic acid mononucleotide adenylyltransferase 1, mitofusin-2, ER membrane protein complex subunit 1, phospholipase A2 group V, dehydrodolichyl diphosphate synthase complex subunit, palmitoyl-protein thioesterase 1, elongation of very long chain fatty acids protein 1, Protein O-linked-mannose beta-1,2-N-acetylglucosaminyltransferase 1, Retinoid isomerohydrolase, Retinal-specific phospholipid-transporting ATPase, Collagen alpha-1 (XI), Guanine nucleotide-binding protein G(t) subunit alpha-2, Chloride channel CLIC-like protein 1, DNA damage-regulated autophagy modulator protein 2, U4/U6 small nuclear ribonucleoprotein Prp3, Alpha-endosulfine, Semaphorin-4A, Cyclic AMP-dependent transcription factor ATF-6 alpha, Hemicentin-1, Complement factor H, Protein crumbs homolog 1, Adiponectin receptor protein 1, Protein RD3, Serine/threonine-protein kinase Nek2, Feline leukemia virus subgroup C receptor-related protein 1, Usherin, Serologically defined colon cancer antigen 8, Olfactory receptor 2W3, NBAS subunit of NRZ tethering complex, Cytosolic carboxypeptidase-like protein 5, Zinc finger protein 513, Intraflagellar transport protein 172 homolog, Photoreceptor cilium actin regulator, EGF-containing fibulin-like extracellular matrix protein 1/TLE family member 5, Protein FAM161A, WD repeat-containing and planar cell polarity effector protein fritz homolog, Centrosome-associated protein ALMS1, U5 small nuclear ribonucleoprotein 200 kDa helicase, Metal transporter CNNM4, Cyclic nucleotide-gated cation channel alpha-3, Nephrocystin-1, Tyrosine-protein kinase Mer, Bardet-Biedl syndrome 5 protein, Ceramide kinase-like protein, Neurogenic differentiation factor 1, Transmembrane protein 237, Inward rectifier potassium channel 13, S-arrestin, Secreted phosphoprotein 24, CCA tRNA nucleotidyltransferase 1, mitochondrial, Sodium bicarbonate cotransporter 3, Leucine zipper transcription factor-like protein 1, Guanine nucleotide-binding protein G(t) subunit alpha-1, Three-prime repair exonuclease 1, MAP kinase-activated protein kinase 3, Ataxin-7, Vitamin K-dependent protein S, ADP-ribosylation factor-like protein 6, Interphotoreceptor matrix proteoglycan 2, IQ calmodulin-binding motif-containing protein 1, Rhodopsin, Nephrocystin-3, Clarin-1, Probable cationic amino acid transporter/Solute carrier family 7 member 14, Choline-phosphate cytidylyltransferase A, Centrosomal protein of 19 kDa, Rod cGMP-specific 3′,5′-cyclic phosphodiesterase subunit beta, Wolframin, Homeobox protein HMX1, Ras-related protein Rab-28, Coiled-coil and C2 domain-containing protein 2A, Prominin-1, Adhesion G protein-coupled receptor A3, Death domain-containing protein 1, WD repeat-containing protein 19, cGMP-gated cation channel alpha-1, CDGSH iron-sulfur domain-containing protein 2, Microsomal triglyceride transfer protein large subunit, Leucine-rich repeat, immunoglobulin-like domain and transmembrane domain-containing protein 3, Bardet-Biedl syndrome 7 protein, Bardet-Biedl syndrome 12 protein, Major facilitator superfamily domain-containing protein 8, Serine/threonine-protein kinase PLK4, Lecithin retinol acyltransferase, Toll-like receptor 3, Cytochrome P450 4V2, Spliceosome-associated protein CWC27 homolog, Centrosomal protein POC5, Versican core protein, Adhesion G-protein coupled receptor V1, COUP transcription factor 1, Mitochondrial outer membrane protein SLC25A46, Catenin alpha-1, Histidine-tRNA ligase, cytoplasmic, Rod cGMP-specific 3′,5′-cyclic phosphodiesterase subunit alpha, Metabotropic glutamate receptor 6, Serine/threonine-protein kinase MAK, Complement C2, Complement factor B, Tubby-related protein 1, Guanylyl cyclase-activating protein 1, Guanylyl cyclase-activating protein 2, Peripherin-2, Interphotoreceptor matrix proteoglycan 1, Protein eyes shut homolog, Collagen alpha-1 (IX) chain, Regulating synaptic membrane exocytosis protein 1, Lebercilin, Elongation of very long chain fatty acids protein 4, PR domain zinc finger protein 13, Reticulon-4-interacting protein 1, mitochondrial, Jouberin, Peroxisomal targeting signal 2 receptor, CCR4-NOT transcription complex subunit 9, Aryl hydrocarbon receptor, Kelch-like protein 7, Retinitis pigmentosa 9 protein, Protein PTHB1, Peroxisomal ATPase PEX1, Tetraspanin-12, Inosine-5′-monophosphate dehydrogenase 1, Short-wave-sensitive opsin 1, UPF0606 protein KIAA1549, Retinitis pigmentosa 1-like 1 protein, Disintegrin and metalloproteinase domain-containing protein 9, Heparan-alpha-glucosaminide N-acetyltransferase, Oxygen-regulated protein 1, Alpha-tocopherol transfer protein, Centrosome and spindle pole-associated protein 1, Dynamin-like 120 kDa protein, mitochondrial, Peroxisome biogenesis factor 2, Cyclic nucleotide-gated cation channel beta-3, Cilia- and flagella-associated protein 418, Growth/differentiation factor 6, Regulating synaptic membrane exocytosis protein 2, Potassium voltage-gated channel subfamily V member 2, E3 ubiquitin-protein ligase Topors, Centrosomal protein of 78 kDa, Inversin, U4/U6 small nuclear ribonucleoprotein Prp4, Whirlin, E3 ubiquitin-protein ligase TRIM32, Toll-like receptor 4, Cytoplasmic dynein 2 intermediate chain 2, Programmed cell death protein 2, Exosome complex component RRP4, Phosphatidylinositol polyphosphate 5-phosphatase type IV, Phytanoyl-CoA dioxygenase, peroxisomal, Acyl-CoA-binding domain-containing protein, Protocadherin-15, Retinol-binding protein 3, DNA excision repair protein ERCC-6, Hexokinase-1, Cadherin-23, Cadherin-related family member 1, RPE-retinal G protein-coupled receptor, Kinesin-like protein KIF11, Retinol-binding protein 4, Cone cGMP-specific 3′,5′-cyclic phosphodiesterase subunit alpha, Paired box protein Pax-2, PDZ domain-containing protein 7, ADP-ribosylation factor-like protein 3, BBSome-interacting protein 1, Age-related maculopathy susceptibility protein 2, Serine protease HTRA1, Ornithine aminotransferase, mitochondrial, Zinc finger protein 408, Tubby protein homolog, Transcriptional enhancer factor TEF-1, Harmonin, Transmembrane protein 216, Bestrophin-1, Isoaspartyl peptidase/L-asparaginase, Rod outer segment membrane protein 1, Bardet-Biedl syndrome 1 protein, Calcium-binding protein 4, Low-density lipoprotein receptor-related protein 5, Calpain-5, Unconventional myosin-VIIa, Transmembrane protein 126A, Frizzled-4, Cytoplasmic dynein 2 light intermediate chain 1, Centrosomal protein of 164 kDa, Complement C1q tumor necrosis factor-related protein 5, Membrane frizzled-related protein, Voltage-dependent calcium channel subunit alpha-2/delta-4, Guanine nucleotide-binding protein G(I)/G(S)/G(T) subunit beta-3, Retinal cone rhodopsin-sensitive cGMP 3′,5′-cyclic phosphodiesterase subunit gamma, Collagen alpha-1 (II) chain, Matrix metalloproteinase-19, Retinol dehydrogenase 5, T-complex protein 1 subunit beta, Bardet-Biedl syndrome 10 protein, Centrosomal protein of 290 kDa, POC1 centriolar protein homolog B, Mevalonate kinase, Intraflagellar transport protein 81 homolog, Mitochondrial translation release factor in rescue, Integral membrane protein 2B, Retinoblastoma-associated protein, RCC1 and BTB domain-containing protein 1, Rhodopsin kinase GRK1, X-linked retinitis pigmentosa GTPase regulator-interacting protein 1, Neural retina-specific leucine zipper protein, Homeobox protein OTX2, Retinol dehydrogenase 11, Retinol dehydrogenase 12, Tubulin polyglutamylase TTLL5, Spermatogenesis-associated protein 7, Tetratricopeptide repeat protein 8, Fibulin-5, Transient receptor potential cation channel subfamily M member 1, Gamma-tubulin complex component 4, Sodium/potassium/calcium exchanger 1, Photoreceptor-specific nuclear receptor, Bardet-Biedl syndrome 4 protein, Calcium and integrin-binding family member 2, Retinaldehyde-binding protein 1, N-acetylglucosamine-1-phosphotransferase subunit gamma, Intraflagellar transport protein 140 homolog, Clusterin-associated protein 1, ATP-binding cassette sub-family C member 6, Ketimine reductase mu-crystallin, Battenin, Zinc finger protein 423, Protein fantom, Bardet-Biedl syndrome 2 protein, ADP-ribosylation factor-like protein 2-binding protein, Cyclic nucleotide-gated cation channel beta-1, Cadherin-3, Pre-mRNA-splicing factor ATP-dependent RNA helicase PRP16, A disintegrin and metalloproteinase with thrombospondin motifs 18, Solute carrier family 38 member 8, Retinal guanylyl cyclase 1, Pre-mRNA-processing-splicing factor 8, Aryl-hydrocarbon-interacting protein-like 1, Membrane-associated phosphatidylinositol transfer protein 3, Protein unc-119 homolog A, Probable G-protein coupled receptor 179, Tectonic-like complex member MKS1, Carbonic anhydrase 4, Regulator of G-protein signaling 9, Arylsulfatase G, pre-mRNA splicing regulator USH1G, Photoreceptor disk component PRCD, Fascin-2, Retinal rod rhodopsin-sensitive cGMP 3′,5′-cyclic phosphodiesterase subunit gamma, Laminin subunit alpha-1, AFG3-like protein 2, Cone-rod homeobox protein, Receptor expression-enhancing protein 6, Retina and anterior neural fold homeobox protein 2, Complement C3, Rho guanine nucleotide exchange factor 18, Patatin-like phospholipase domain-containing protein 6, Regulator of G-protein signaling 9-binding protein, Optic atrophy 3 protein, U4/U6 small nuclear ribonucleoprotein Prp31, Isocitrate dehydrogenase [NAD] subunit beta, mitochondrial, Pantothenate kinase 2, mitochondrial, Protein jagged-1, Molecular chaperone MKKS, Centrosomal protein kizuna, Lysophosphatidylserine lipase ABHD12, Kinesin-like protein KIF3B, Centrosome-associated protein CEP250, Pre-mRNA-processing factor 6, Cilia- and flagella-associated protein 410, Dynamin-1-like protein, Metalloproteinase inhibitor 3, Intraflagellar transport protein 27 homolog, Fibulin-1, MIEF1 upstream open reading frame protein, Aconitate hydratase, mitochondrial, Gamma-tubulin complex component 6, Centriole and centriolar satellite protein, Retinoschisin, Protein XRP2, Dystrophin, X-linked retinitis pigmentosa GTPase regulator, Nyctalopin, Xaa-Pro dipeptidase, Norrin, Voltage-dependent L-type calcium channel subunit alpha-1F, Phosphoglycerate kinase 1, Rab proteins geranylgeranyltransferase component A 1, Mitochondrial import inner membrane translocase subunit Tim8 A, Ribose-phosphate pyrophosphokinase 1, Long-wave-sensitive opsin 1, Medium-wave-sensitive opsin 1, Short-wave-sensitive opsin 1, Transcription factor A, mitochondrial, NADH-ubiquinone oxidoreductase chain 1, NADH-ubiquinone oxidoreductase chain 2, NADH-ubiquinone oxidoreductase chain 3, NADH-ubiquinone oxidoreductase chain 4L, NADH-ubiquinone oxidoreductase chain 4, NADH-ubiquinone oxidoreductase chain 5, NADH-ubiquinone oxidoreductase chain 6, ATP synthase subunit a, ATP synthase protein 8, Cytochrome c oxidase subunit 1, Cytochrome c oxidase subunit 3, Cytochrome b, Leucine-tRNA ligase, mitochondrial, Nondiscriminating glutamyl-tRNA synthetase EARS2, mitochondrial, Lysine-tRNA ligase, Histidine-tRNA ligase, mitochondrial, Serine-tRNA ligase, mitochondrial, Probable proline-tRNA ligase, mitochondrial, Cyanocobalamin reductase/alkylcobalamin dealkylase, POU domain, class 3, transcription factor 4, Ribosomal protein S6 kinase alpha-6, Ciliogenesis and planar polarity effector 1, Meckelin, TRAF3-interacting protein 1, Intraflagellar transport protein 74 homolog, S phase cyclin A-associated protein in the endoplasmic reticulum, Sodium channel and clathrin linker 1, Protein TALPID3, Tectonic-2, ADP-ribosylation factor-like protein 13B, B9 domain-containing protein 1, B9 domain-containing protein 2, C2 domain-containing protein 3, Centrosomal protein of 41 kDa, Centrosomal protein of 104 kDa, Centrosomal protein of 120 kDa, Intraflagellar transport protein 172 homolog, Katanin-interacting protein, Kinesin-like protein KIF7, Retinal rod rhodopsin-sensitive cGMP 3′,5′-cyclic phosphodiesterase subunit delta, Tectonic-1, Tectonic-3, Transmembrane protein 107, Transmembrane protein 138, Transmembrane protein 231, Tetratricopeptide repeat protein 21B, Nuclear receptor ROR-alpha, Beta-nerve growth factor, Collagen alpha-2 (VIII) chain, Solute carrier family 4 member 11, Zinc finger E-box-binding homeobox 1, Keratin, type II cuticular Hb3, Keratin, type I cytoskeletal 12, Transforming growth factor-beta-induced protein ig-h3, Tumor-associated calcium signal transducer 2, Carbohydrate sulfotransferase 6, Gelsolin, UbiA prenyltransferase domain-containing protein 1, Decorin, 1-phosphatidylinositol 3-phosphate 5-kinase, Transcription factor Ovo-like 2, and Grainyhead-like protein 2 homolog.

[0012] In some embodiments that may be combined with any of the preceding embodiments, the recombinant herpes virus genome has reduced cytotoxicity when introduced into a target cell as compared to a corresponding wild-type herpes virus genome. In some embodiments, the target cell is a human cell. In some embodiments, the target cell is a cell of the eye. In some embodiments, the target cell is a corneal epithelial cell. In some embodiments, the target cell is a cell of the retina. In some embodiments, the target cell is a retinal pigment epithelial cell. In some embodiments, the target cell is a photoreceptor.

[0013] Other aspects of the present disclosure relate to a herpes virus comprising any of the recombinant herpes virus genomes described herein. In some embodiments, the herpes virus is replication competent. In some embodiments, the herpes virus is replication defective. In some embodiments that may be combined with any of the preceding embodiments, the herpes virus is not oncolytic. In some embodiments that may be combined with any of the preceding embodiments, the herpes virus is a pseudotyped virus. In some embodiments that may be combined with any of the preceding embodiments, the herpes virus is not a pseudotyped virus. In some embodiments that may be combined with any of the preceding embodiments, the herpes virus is not a pseudotyped oncolytic virus. In some embodiments that may be combined with any of the preceding embodiments, the herpes virus has reduced cytotoxicity as compared to a corresponding wild-type herpes virus. In some embodiments that may be combined with any of the preceding embodiments, the herpes virus is selected from a herpes simplex virus, a varicella zoster virus, a human cytomegalovirus, a herpesvirus 6A, a herpesvirus 6B, a herpesvirus 7, an Epstein-Barr virus, a Kaposi's sarcoma-associated herpesvirus, and any combinations or derivatives thereof. In some embodiments that may be combined with any of the preceding embodiments, the herpes virus is a herpes simplex virus. In some embodiments, the herpes simplex virus is not oncolytic. In some embodiments, the herpes simplex virus is an HSV-1, an HSV-2, or any combinations or derivatives thereof. In some embodiments, the herpes simplex virus is an HSV-1. In some embodiments, the HSV-1 is not oncolytic.

[0014] Other aspects of the present disclosure relate to a pharmaceutical composition comprising any of the recombinant herpes virus genomes and/or any of the recombinant herpes viruses described herein and a pharmaceutically acceptable carrier or excipient. In some embodiments that may be combined with any of the preceding embodiments, the pharmaceutical composition is suitable for ocular, subretinal, intraocular, intravitreal, topical, subcutaneous, subconjunctival, subtenon, subtenon capsule, intracameral, retrobulbar, systemic, parenteral, periocular, juxtascleral, anterior juxtascleral, posterior juxtascleral, oral, peribulbar, or suprachoroidal administration. In some embodiments that may be combined with any of the preceding embodiments, the pharmaceutical composition comprises a phosphate buffer. In some embodiments that may be combined with any of the preceding embodiments, the pharmaceutical composition comprises glycerol. In some embodiments that may be combined with any of the preceding embodiments, the pharmaceutical composition comprises a lipid carrier. In some embodiments that may be combined with any of the preceding embodiments, the pharmaceutical composition comprises a nanoparticle carrier.

[0015] Other aspects of the present disclosure relate to the use of any of the recombinant nucleic acids (e.g., recombinant herpes virus genomes), recombinant viruses (e.g., recombinant herpes viruses), and/or pharmaceutical compositions described herein as a medicament.

[0016] Other aspects of the present disclosure relate to the use of any of the recombinant nucleic acids (e.g., recombinant herpes virus genomes), recombinant viruses (e.g., recombinant herpes viruses), and/or pharmaceutical compositions described herein in a therapy.

[0017] Other aspects of the present disclosure relate to the use of any of the recombinant nucleic acids (e.g., recombinant herpes virus genomes), recombinant viruses (e.g., recombinant herpes viruses), and/or pharmaceutical compositions described herein in the preparation of a medicament for treating an eye condition or disease.

[0018] Other aspects of the present disclosure relate to a method of expressing, enhancing, increasing, augmenting, and/or supplementing the levels of a polypeptide in one or more cells of a subject comprising administering to the subject an effective amount of any of the recombinant herpes viruses and/or pharmaceutical compositions described herein. In some embodiments, the one or more cells are one or more cells of the eye. In some embodiments that may be combined with any of the preceding embodiments, the subject is a human. In some embodiments that may be combined with any of the preceding embodiments, the herpes virus or pharmaceutical composition is administered via injection, via injection to the eye, via subretinal injection, via intraocular injection, via intravitreal injection, via suprachoroidal injection, intraocularly, intravitreally, topically, subcutaneously, subconjunctivally, subtenonly, intracamerally, retrobulbarly, systemically, parenterally, periocularly, juxtasclerally, anterior juxtasclerally, posterior juxtasclerally, orally, peribulbarly, or suprachoroidally.

[0019] Other aspects of the present disclosure relate to a method of providing prophylactic, palliative, or therapeutic relief of one or more signs or symptoms of an eye condition or disease in a subject in need thereof comprising administering to the subject an effective amount of any of the recombinant herpes viruses and/or pharmaceutical compositions described herein. In some embodiments, the eye condition or disease is selected from the group consisting of retinitis pigmentosa, recessive retinitis pigmentosa, severe recessive retinitis pigmentosa, dominant retinitis pigmentosa, dominant retinitis pigmentosa with choroidal involvement, recessive retinitis pigmentosa with para-arteriolar preservation of the RPE (PPRPE), recessive retinitis pigmentosa with posterior column ataxia (PCARP), recessive retinitis pigmentosa with erythrocytic microcytosis, syndromic recessive retinitis pigmentosa, recessive syndromic disease with retinitis pigmentosa, non-syndromic recessive retinitis pigmentosa, non-syndromic dominant retinitis pigmentosa, syndromic dominant retinitis pigmentosa, juvenile recessive retinitis pigmentosa, recessive retinitis pigmentosa and mental retardation, recessive retinitis pigmentosa with macular degeneration, severe early-onset recessive retinitis pigmentosa, recessive retinitis pigmentosa and skeletal anomalies, recessive retinitis pigmentosa and skeletal abnormalities, dominant retinitis pigmentosa with sensorineural deafness, recessive retinitis pigmentosa with hearing loss, recessive retinitis pigmentosa with hearing loss and additional disabilities, recessive retinitis pigmentosa with vitreal alterations, early onset with macular coloboma recessive retinitis pigmentosa, X-linked retinitis pigmentosa, recessive X-linked retinitis pigmentosa, dominant X-linked retinitis pigmentosa, severe X-linked retinitis pigmentosa, X-linked retinitis pigmentosa with mental retardation, X-linked retinitis pigmentosa with myopathy, Bardet-Biedl like retinitis pigmentosa, Bardet-Biedl like recessive retinitis pigmentosa, digenic retinitis pigmentosa, digenic retinitis pigmentosa with retinal outer segment membrane protein 1, digenic retinitis pigmentosa with PRPH2, recessive retinitis pigmentosa with early macular involvement, recessive deafness without retinitis pigmentosa, recessive congenital deafness without retinitis pigmentosa, recessive retinitis pigmentosa and recessive ataxia, recessive retinitis pigmentosa and dominant ataxia, mitochondrial retinitis pigmentosa, mitochondrial retinitis pigmentosa with developmental and neurological abnormalities, mitochondrial retinitis pigmentosa with progressive sensorineural hearing loss, mitochondrial retinitis pigmentosa with deafness and neurological abnormalities, Autosomal Dominant Retinitis Pigmentosa, Nonsyndromic Autosomal Dominant Retinitis Pigmentosa, Autosomal Recessive, Retinitis Pigmentosa, Nonsyndromic Autosomal Recessive Retinitis Pigmentosa, Retinal pigment epithelium (RPE), recessive RPE, dominant RPE, recessive RPE degeneration, dominant RPE degeneration, ataxia, recessive ataxia, dominant ataxia, Senior-Loken syndrome, recessive Senior-Loken syndrome, dominant Senior-Loken syndrome, nephronophthisis, recessive nephronophthisis, dominant nephronophthisis, adolescent recessive nephronophthisis, ciliopathy-related recessive nephronophthisis, juvenile nephronophthisis, juvenile recessive nephronophthisis, juvenile dominant nephronophthisis, Usher syndrome, Usher syndrome type I, Usher syndrome type II, Usher syndrome type III, recessive Usher syndrome, atypical recessive Usher syndrome, dominant Usher syndrome, type 2 recessive Usher syndrome, type 2a recessive Usher syndrome, type 3 recessive Usher syndrome, type 3-like recessive Usher syndrome, atypical recessive Usher syndrome, type 1 recessive Usher syndrome, type 1b recessive Usher syndrome, type 1d recessive Usher syndrome, type 1f recessive Usher syndrome, type 1J recessive Usher syndrome, type 1k recessive Usher syndrome, digenic Usher syndrome with CDH23, digenic Usher syndrome with PCDH15, Acadian recessive Usher syndrome, recessive atypical Usher syndrome (USH3-like), Leber congenital amaurosis, recessive Leber congenital amaurosis, dominant Leber congenital amaurosis, de novo Leber congenital amaurosis, dominant Leber congenital amaurosis and pituitary dysfunction, recessive Leber congenital amaurosis with myopathy, recessive Leber congenital amaurosis with severe childhood retinal dystrophy, mitochondrial Leber hereditary optic neuropathy, Leber hereditary optic neuropathy, optic atrophy, recessive optic atrophy, dominant optic atrophy, optic atrophy with ataxia, recessive optic atrophy with ataxia, dominant optic atrophy with ataxia, recessive optic atrophy with ataxia and 3-methylglutaconic aciduria, dominant optic atrophy with cataract, ataxia and areflexia, Kjer type dominant optic atrophy, dominant optic atrophy with sensorineural hearing loss, recessive cerebellar degeneration with optic atrophy, optic atrophy with deadness-dystonia syndrome, X-linked optic atrophy with deadness-dystonia syndrome, retinal dystrophy, recessive retinal dystrophy, dominant retinal dystrophy, inherited retinal dystrophy, early onset recessive retinal dystrophy, recessive syndromic retinal dystrophy, recessive non-syndromic retinal dystrophy, recessive syndromic and non-syndromic retinal dystrophy, recessive optic atrophy and retinal dystrophy, recessive retinal dystrophy and obesity, recessive retinal dystrophy and cerebellar dysplasia, syndromic recessive optic atrophy and retinal dystrophy, dominant retinal dystrophy with iris coloboma, spectrum of ciliopathies including retinal dystrophy, recessive spectrum of ciliopathies including retinal dystrophy, dominant spectrum of ciliopathies including retinal dystrophy, dominant optic atrophy with neuropathy and myopathy, dominant optic atrophy with intellectual disability and developmental delay, syndromic optic atrophy, non-syndromic optic atrophy, recessive non-syndromic optic atrophy, dominant non-syndromic optic atrophy, recessive syndromic optic atrophy, dominant syndromic optic atrophy, Charcot-Marie-Tooth disease, recessive Charcot-Marie-Tooth disease, dominant Charcot-Marie-Tooth disease, benign fleck retina, recessive benign fleck retina, dominant benign fleck retina, syndromic retinopathy, recessive syndromic retinopathy, dominant syndromic retinopathy, Batten disease, recessive Batten disease, dominant Batten disease, recessive Batten disease (ceroid-lipofuscinosis, neuronal 3), juvenile recessive Batten disease (ceroid-lipofuscinosis, neuronal 3), neuronal ceroid lipofuscinosis, recessive neuronal ceroid lipofuscinosis, recessive neuronal ceroid lipofuscinosis 1, dominant neuronal ceroid lipofuscinosis, Stargardt disease, recessive Stargardt disease, dominant Stargardt disease, juvenile Stargardt disease, late onset Stargardt disease, Stargardt-like macular dystrophy, recessive Stargardt-like macular dystrophy, dominant Stargardt-like macular dystrophy, macular dystrophy, recessive macular dystrophy, early onset macular dystrophy, adult onset macular dystrophy, early onset recessive macular dystrophy, adult onset recessive macular dystrophy, early adult onset recessive macular dystrophy, juvenile with hypotrichosis recessive macular dystrophy, dominant macular dystrophy, late onset dominant macular dystrophy, dominant macular dystrophy with lens zonules, bull's-eye dominant macular dystrophy, butterfly-shaped dominant macular dystrophy, age-related dominant macular dystrophy, benign concentric annular dominant macular dystrophy, vitelliform recessive macular dystrophy, vitelliform dominant macular dystrophy, atypical vitelliform dominant macular dystrophy, dominant adult vitelliform macular dystrophy, Stargardt-like dominant macular dystrophy, Stargardt type dominant macular dystrophy, North Carolina dominant macular dystrophy, North Carolina-like dominant macular dystrophy, North Carolina-like with progressive sensorineural hearing loss dominant macular dystrophy, cystoid dominant macular dystrophy, Best type dominant macular dystrophy, occult macular dystrophy, recessive occult macular dystrophy, dominant occult macular dystrophy, age-related familial macular dystrophy, X-linked atrophic macular dystrophy, recessive X-linked atrophic macular dystrophy, dominant X-linked atrophic macular dystrophy, mitochondrial macular pattern dystrophy with type II diabetes and deafness, fundus flavimaculatus, recessive fundus flavimaculatus, dominant fundus flavimaculatus, rod dystrophy, recessive rod dystrophy, dominant rod dystrophy, cone dystrophy, recessive cone dystrophy, dominant cone dystrophy, recessive cone dystrophy with supernormal rod electroretinogram, early onset recessive cone dystrophy, late onset recessive cone dystrophy, cone dystrophy 1, X-linked cone dystrophy 1, cone dystrophy 2, progressive cone dystrophy 2, X-linked progressive cone dystrophy 2, delayed cone adaptation, recessive delayed cone adaptation, dominant delayed cone adaptation, cone-rod dystrophy, recessive cone-rod dystrophy, dominant cone-rod dystrophy, isolated cone-rod dystrophy, progressive cone-rod dystrophy, X-linked cone-rod dystrophy, X-linked progressive cone-rod dystrophy, progressive dominant cone-rod dystrophy, cone-rod dystrophy and amelogenesis imperfecta syndrome, recessive cone-rod dystrophy and amelogenesis imperfecta syndrome, dominant cone-rod dystrophy and amelogenesis imperfecta syndrome, recessive cone-rod dystrophy with inner retinopathy, recessive cone-rod dystrophy with skeletal disease, congenital syndromic nonprogressive recessive cone-rod dystrophy, recessive cone-rod dystrophy with hearing loss, recessive cone-rod dystrophy with psychomotor delay, recessive cone and cone-rod dystrophy, cone-rod synaptic disease, congenital cone-rod synaptic disease, recessive congenital cone-rod synaptic disease, dominant congenital cone-rod synaptic disease, rod-cone dystrophy, recessive rod-cone dystrophy, dominant rod-cone dystrophy, early onset recessive rod-cone dystrophy, non-syndromic recessive rod-cone dystrophy, recessive Newfoundland rod-cone dystrophy, recessive progressive cone dystrophy, Stickler syndrome, dominant Stickler syndrome, recessive Stickler syndrome, dominant Stickler syndrome type I, dominant Stickler syndrome type II, Marshall syndrome, dominant Marshall syndrome, recessive Marshall syndrome, achromatopsia, recessive achromatopsia, dominant achromatopsia, recessive complete achromatopsia, recessive incomplete achromatopsia, macular degeneration, age-related macular degeneration, complex etiology age-related macular degeneration, isolated age-related macular degeneration, wet age-related macular degeneration, dry age-related macular degeneration, drusen, recessive drusen, dominant drusen, early-onset recessive drusen, early-onset dominant drusen, macular drusen, dominant radial macular drusen, pigmented paravenous chorioretinal atrophy, recessive pigmented paravenous chorioretinal atrophy, dominant pigmented paravenous chorioretinal atrophy, progressive Bifocal Chorioretinal Atrophy, Bardet-Biedl syndrome, recessive Bardet-Biedl syndrome, dominant Bardet-Biedl syndrome, recessive Bardet-Biedl syndrome with developmental anomalies, retinal degeneration, recessive retinal degeneration, dominant retinal degeneration, non-syndromic recessive retinal degeneration, Doyne honeycomb retinal degeneration, recessive Doyne honeycomb retinal degeneration, dominant Doyne honeycomb retinal degeneration (Malattia Leventinese), recessive nephronophthisis with retinal degeneration, Alström syndrome, recessive Alström syndrome, dominant Alström syndrome, Joubert syndrome, recessive Joubert syndrome, dominant Joubert syndrome, Jobert syndrome, recessive Jobert syndrome, dominant Jobert syndrome, X-linked Jobert syndrome, vitreoretinal degeneration, recessive vitreoretinal degeneration, dominant vitreoretinal degeneration, snowflake vitreoretinal degeneration, snowflake dominant vitreoretinal degeneration, Oguchi disease, recessive Oguchi disease, dominant Oguchi disease, night blindness, stationary night blindness, congenital night blindness, congenital stationary night blindness, severe congenital stationary night blindness, recessive congenital stationary night blindness, recessive complete congenital stationary night blindness, dominant congenital stationary night blindness, Nougaret type dominant congenital stationary night blindness, Oguchi type recessive congenital stationary night blindness, Riggs type recessive congenital stationary night blindness, Schubert-Bornschein type recessive congenital stationary night blindness, fundus albipunctatus type recessive congenital stationary night blindness, complete recessive congenital stationary night blindness, X-linked congenital stationary night blindness, incomplete X-linked congenital stationary night blindness, retinal vasculopathy, cerebral leukodystrophy, retinal vasculopathy with cerebral leukodystrophy, recessive retinal vasculopathy with cerebral leukodystrophy, dominant retinal vasculopathy with cerebral leukodystrophy, Aicardi-Goutiere syndrome, Aicardi-Goutiere syndrome 1, recessive Aicardi-Goutiere syndrome 1, dominant Aicardi-utiere syndrome 1, chilblain lupus, recessive chilblain lupus, dominant chilblain lupus, Martinique retinal dystrophy and retinitis pigmentosa, recessive Martinique retinal dystrophy and retinitis pigmentosa, dominant Martinique retinal dystrophy and retinitis pigmentosa, spinocerebellar ataxia, recessive spinocerebellar ataxia, dominant spinocerebellar ataxia, spinocerebellar ataxia with macular dystrophy, spinocerebellar ataxia with retinal degeneration, spinocerebellar ataxia with macular dystrophy or retinal degeneration, recessive spinocerebellar ataxia with macular dystrophy or retinal degeneration, dominant spinocerebellar ataxia with macular dystrophy or retinal degeneration, Wolfram syndrome, recessive Wolfram syndrome, dominant Wolfram syndrome, low frequency sensorineural hearing loss, recessive low frequency sensorineural hearing loss, dominant low frequency sensorineural hearing loss, oculoauricular syndrome, recessive oculoauricular syndrome, dominant oculoauricular syndrome, recessive renal, skeletal and retinal anomalies, recessive abetalipoproteinemia, microcephaly, recessive microcephaly, dominant microcephaly, growth failure and retinopathy recessive microcephaly, Bietti crystalline corneoretinal dystrophy, recessive Bietti crystalline corneoretinal dystrophy, dominant Bietti crystalline corneoretinal dystrophy, Wagner disease, erosive vitreoretinopathy, Wagner disease and erosive vitreoretinopathy, recessive Wagner disease and erosive vitreoretinopathy, dominant Wagner disease and erosive vitreoretinopathy, febrile convulsions, recessive febrile convulsions, dominant febrile convulsions, dominant/recessive febrile convulsions, choroidal dystrophy, recessive choroidal dystrophy, dominant choroidal dystrophy, central areolar choroidal dystrophy, dominant central areolar choroidal dystrophy, recessive central areolar choroidal dystrophy, epiphyseal dysplasia, recessive epiphyseal dysplasia, dominant epiphyseal dysplasia, multiple epiphyseal dysplasia, recessive multiple epiphyseal dysplasia, dominant multiple epiphyseal dysplasia, ichthyosis, recessive ichthyosis, dominant ichthyosis, quadriplegia and retardation recessive ichthyosis, chorioretinal atrophy, bifocal chorioretinal atrophy, progressive bifocal chorioretinal atrophy, recessive progressive bifocal chorioretinal atrophy, dominant progressive bifocal chorioretinal atrophy, Refsum disease, recessive Refsum disease, dominant Refsum disease, adult form recessive Refsum disease, infantile form recessive Refsum disease, retinal-cone dystrophy, recessive retinal-cone dystrophy, dominant retinal-cone dystrophy, retinal-cone dystrophy 1, recessive retinal-cone dystrophy 1, dominant retinal-cone dystrophy 1, tritanopia, recessive tritanopia, dominant tritanopia, mucopolysaccharidosis, recessive mucopolysaccharidosis, dominant mucopolysaccharidosis, achromatopsia Pingelapese, recessive achromatopsia Pingelapese, dominant achromatopsia Pingelapese, Klippel-Feil syndrome, recessive Klippel-Feil syndrome, dominant Klippel-Feil syndrome, microphthalmia, recessive microphthalmia, dominant microphthalmia, limb-girdle muscular dystrophy, recessive limb-girdle muscular dystrophy, dominant limb-girdle muscular dystrophy, short-rib thoracic dysplasia, recessive short-rib thoracic dysplasia, dominant short-rib thoracic dysplasia, polydactyly recessive short-rib thoracic dysplasia, retinal dystrophy recessive short-rib thoracic dysplasia, mental retardation, truncal obesity, retinal dystrophy, and micropenis (MORM) syndrome, recessive MORM syndrome, dominant MORM syndrome, spasticity and retinal degeneration recessive retardation, Cockayne syndrome, recessive Cockayne syndrome, dominant Cockayne syndrome, congenital retinal nonattachment, recessive nonsyndromal congenital retinal nonattachment, dominant nonsyndromal congenital retinal nonattachment, hemolytic anemia, nonspherocytic hemolytic anemia, recessive nonspherocytic hemolytic anemia, dominant nonspherocytic hemolytic anemia, hereditary neuropathy, hereditary neuropathy (Russe type), recessive hereditary neuropathy (Russe type), dominant hereditary neuropathy (Russe type), choroidal sclerosis, recessive choroidal sclerosis, dominant choroidal sclerosis, retinopathy, recessive retinopathy, dominant retinopathy, combined dominant and recessive retinopathy, diffuse dominant retinopathy, variable dominant retinopathy, diffuse and variable dominant retinopathy, microcephaly, recessive microcephaly, dominant microcephaly, lymphedema dominant microcephaly, chorioretinopathy dominant microcephaly, lymphedema and chorioretinopathy dominant microcephaly, chorioretinopathy, recessive chorioretinopathy, dominant chorioretinopathy, chorioretinopathy and microcephaly, recessive chorioretinopathy and microcephaly, dominant chorioretinopathy and microcephaly, renal-coloboma syndrome, recessive renal-coloboma syndrome, dominant renal-coloboma syndrome, non-syndromic deafness, recessive non-syndromic deafness, dominant non-syndromic deafness, gyrate atrophy, recessive gyrate atrophy, dominant gyrate atrophy, gyrate atrophy of the choroid and retina, vitreoretinopathy, exudative vitreoretinopathy, familial exudative vitreoretinopathy, recessive familial exudative vitreoretinopathy, dominant familial exudative vitreoretinopathy, dominant familial exudative vitreoretinopathy and Coats disease, neovascular inflammatory vitreoretinopathy, recessive neovascular inflammatory vitreoretinopathy, dominant neovascular inflammatory vitreoretinopathy, atrophia areata, recessive atrophia areata, dominant atrophia areata, Meckel syndrome, recessive Meckel syndrome, dominant Meckel syndrome, vitreoretinochoroidopathy, recessive vitreoretinochoroidopathy, dominant vitreoretinochoroidopathy, bestrophinopathy, recessive bestrophinopathy, dominant bestrophinopathy, high bone mass trait, recessive high bone mass trait, dominant high bone mass trait, osteoporosis-pseudoglioma syndrome, recessive osteoporosis-pseudoglioma syndrome, dominant osteoporosis-pseudoglioma syndrome, microphthalmos, recessive microphthalmos, dominant microphthalmos, retinal disease syndrome, recessive retinal disease syndrome, dominant retinal disease syndrome, microphthalmos and retinal disease syndrome, recessive microphthalmos and retinal disease syndrome, dominant microphthalmos and retinal disease syndrome, nanophthalmos, recessive nanophthalmos, dominant nanophthalmos, bone dysplasias, recessive bone dysplasias, dominant bone dysplasias, developmental disorders, osteoarthritic diseases and syndromic disorders, cavitary optic disc anomalies, recessive cavitary optic disc anomalies, dominant cavitary optic disc anomalies, fundus albipunctatus, recessive fundus albipunctatus, dominant fundus albipunctatus, mevalonic aciduria, recessive mevalonic aciduria, dominant mevalonic aciduria, hyper-IgD syndrome, recessive hyper-IgD syndrome, dominant hyper-IgD syndrome, spastic paraplegia, recessive spastic paraplegia, dominant spastic paraplegia, neuropathy recessive spastic paraplegia, optic atrophy recessive spastic paraplegia, neuropathy and optic atrophy recessive spastic paraplegia (dementia), recessive dementia, dominant dementia, familial dominant dementia, retinoblastoma, recessive retinoblastoma, dominant retinoblastoma, germline retinoblastoma, somatic retinoblastoma, dominant germline or somatic retinoblastoma, retinoma, benign retinoma, pinealoma, osteogenic sarcoma, rod monochromacy, recessive rod monochromacy, dominant rod monochromacy, achromatopsia, recessive achromatopsia, dominant achromatopsia, rod achromatopsia, rod recessive achromatopsia, rod dominant achromatopsia, recessive rod monochromacy or achromatopsia, pattern dystrophy, recessive pattern dystrophy, dominant pattern dystrophy, S-cone syndrome, enhanced S-cone syndrome (ESC), recessive ESC, dominant ESC, Goldmann-Favre syndrome, recessive Goldmann-Favre syndrome, dominant Goldmann-Favre syndrome, Bothnia dystrophy, recessive Bothnia dystrophy, dominant Bothnia dystrophy, retinitis punctata albescens, recessive retinitis punctata albescens, dominant retinitis punctata albescens, mucolipidosis III gamma, recessive mucolipidosis III gamma, dominant mucolipidosis III gamma, Mainzer-Saldino syndrome, recessive Mainzer-Saldino syndrome, dominant Mainzer-Saldino syndrome, pseudoxanthoma elasticum, recessive pseudoxanthoma elasticum, dominant pseudoxanthoma elasticum, Knobloch syndrome, recessive Knobloch syndrome, dominant Knobloch syndrome, foveal hypoplasia, recessive foveal hypoplasia, dominant foveal hypoplasia, anterior segment dysgenesis, recessive anterior segment dysgenesis, dominant anterior segment dysgenesis, foveal hypoplasia and anterior segment dysgenesis, recessive foveal hypoplasia and anterior segment dysgenesis, dominant foveal hypoplasia and anterior segment dysgenesis, spastic ataxia, recessive spastic ataxia, dominant spastic ataxia, de Grouchy syndrome, Boucher-Neuhauser syndrome, recessive Boucher-Neuhauser syndrome, dominant Boucher-Neuhauser syndrome, Boucher-Neuhauser syndrome with chorioretinal dystrophy, recessive Boucher-Neuhauser syndrome with chorioretinal dystrophy, dominant Boucher-Neuhauser syndrome with chorioretinal dystrophy, hypoprebetalipoproteinemia, acanthocytosis, retinitis pigmentosa, and palladial (HARP), degeneration, recessive HARP degeneration, dominant HARP degeneration, Hallervorden-Spatz syndrome, recessive Hallervorden-Spatz syndrome, dominant Hallervorden-Spatz syndrome, Alagille syndrome, recessive Alagille syndrome, dominant Alagille syndrome, polyneuropathy, hearing loss, ataxia, retinitis pigmentosa and early-onset cataract (PHARC), recessive PHARC, dominant PHARC, recessive syndromic PHARC, Sorsby's fundus dystrophy, recessive Sorsby's fundus dystrophy, dominant Sorsby's fundus dystrophy, vitreoretinal dystrophy, recessive vitreoretinal dystrophy, dominant vitreoretinal dystrophy, optic neuropathy, recessive optic neuropathy, dominant optic neuropathy, late onset dominant optic neuropathy, orofaciodigital syndrome 1, Simpson-Golabi-Behmel syndrome 2, X-linked retinoschisis, X-linked Oregon eye disease, X-linked optic atrophy, retinal dysplasia, recessive retinal dysplasia, dominant retinal dysplasia, X-linked retinal dysplasia, primary X-linked retinal dysplasia, X-linked Norrie disease, Coats disease, X-linked Åland Island eye disease, Autoimmune Inner Ear Disease (AIED), AIED-like disease, choroideremia, X-linked choroideremia, neuropathy, optic atrophy, deafness and retinitis pigmentosa, X-linked neuropathy, optic atrophy, deafness and retinitis pigmentosa, X-linked blue cone monochromacy, X-linked protanomaly and rare macular dystrophy in blue cone monochromacy (BCM), X-linked deuteranomaly and rare macular dystrophy in blue cone monochromacy (BCM), mitochondrial Kearns-Sayre syndrome including retinal pigmentary degeneration, Leigh syndrome, retinopathy, mitochondrial pigmentary retinopathy and sensorineural hearing loss, ocular albinism, oculocutaneous albinism, Neuronal ceroid lipofuscinoses, Zellweger spectrum disorder, Cobalamin C deficiency, blue-cone monochromatism, hereditary red-green color vision defects, tritan and yellow-blue defects, bradyopsia, delayed cone adaptation, Uveitis, Diabetic Retinopathy, Diabetic Macular Edema, Persistent Corneal Epithelial Defect, Neurotrophic Keratitis, Herpes Stromal Keratitis, Chronic Dry Eye, Glaucoma, ocular abrasion, ocular blistering, ocular scarring, vision loss, blindness, corneal blindness, dry eye disease, aqueous deficiency dry eye disease, Sjögren's syndrome-related aqueous deficiency dry eye disease, non-Sjögren's syndrome-related dry eye disease, evaporative dry eye disease, meibomian gland dysfunction, blepharitis, lid margin inflammation, ocular rosacea and atopy, aqueous deficiency and evaporative dry eye disease, Fuchs dystrophy, Fuchs endothelial corneal dystrophy (FECD), Fuchs endothelial dystrophy (FED), panuveitis, diffuse uveitis, total uveitis, cataract, partial cataracts, complete cataracts, stationary cataracts, progressive cataracts, hard cataracts, soft cataracts, nuclear cataracts, nuclear sclerosis cataracts, cortical cataracts, posterior subcapsular cataracts, congenital cataracts, corneal dystrophy, Epithelial and subepithelial dystrophies, Epithelial basement membrane dystrophy, Epithelial recurrent erosion dystrophies (Franceschetti corneal dystrophy, Dystrophia Smolandiensis, and/or Dystrophia Helsinglandica), Subepithelial mucinous corneal dystrophy, Meesmann corneal dystrophy, Lisch epithelial corneal dystrophy, Gelatinous drop-like corneal dystrophy, Bowman Layer dystrophies, Reis-Bücklers corneal dystrophy, Thiel-Behnke corneal dystrophy, Stromal dystrophies-TGFB1 corneal dystrophies, Lattice corneal dystrophy, type 1 variants (III, IIIA, I/IIIA, IV) of lattice corneal dystrophy, Granular corneal dystrophy, type 1, Granular corneal dystrophy, type 2, Stromal dystrophies, Macular corneal dystrophy, Schnyder crystalline corneal dystrophy, Congenital stromal corneal dystrophy, Fleck corneal dystrophy, Posterior amorphous corneal dystrophy, Central cloudy dystrophy of François, Pre-Descemet corneal dystrophy, Endothelial dystrophies, Fuchs' dystrophy, Posterior polymorphous corneal dystrophy, Congenital hereditary endothelial dystrophy, X-linked endothelial corneal dystrophy, Superficial dystrophies, Epithelial basement membrane dystrophy, Meesmann juvenile epithelial corneal dystrophy, Gelatinous drop-like corneal dystrophy, Lisch epithelial corneal dystrophy, Subepithelial mucinous corneal dystrophy, Reis-Bucklers corneal dystrophy, Thiel-Behnke dystrophy, Stromal dystrophies, Lattice corneal dystrophy, Granular corneal dystrophy, Macular corneal dystrophy, Schnyder crystalline corneal dystrophy, Congenital stromal corneal dystrophy, Fleck corneal dystrophy, Posterior dystrophies, Fuchs' dystrophy, Posterior polymorphous corneal dystrophy, Congenital hereditary endothelial dystrophy, keratopathy, band keratopathy, corneal band keratopathy, and calcific band keratopathy. In some embodiments, the eye condition or disease is Stargardt syndrome. In some embodiments, the eye condition or disease is neurotrophic keratitis. In some embodiments, the eye condition or disease is Leber congenital amaurosis. In some embodiments that may be combined with any of the preceding embodiments, the subject is a human. In some embodiments that may be combined with any of the preceding embodiments, the herpes virus or pharmaceutical composition is administered via injection, via injection to the eye, via subretinal injection, via intraocular injection, via intravitreal injection, via suprachoroidal injection, intraocularly, intravitreally, topically, subcutaneously, subconjunctivally, subtenonly, intracamerally, retrobulbarly, systemically, parenterally, periocularly, juxtasclerally, anterior juxtasclerally, posterior juxtasclerally, orally, peribulbarly, or suprachoroidally to the subject.

[0020] Other aspects of the present disclosure relate to any of the recombinant herpes viruses and/or pharmaceutical compositions described herein for use in the treatment of an eye condition or disease in a subject in need thereof.

[0021] Other aspects of the present disclosure relate to a method of treating an eye condition or disease in a subject in need thereof comprising administering to the subject an effective amount of any of the recombinant herpes viruses and/or pharmaceutical compositions described herein.

[0022] In any of the preceding embodiments, the eye condition or disease can be selected from the group consisting of retinitis pigmentosa, recessive retinitis pigmentosa, severe recessive retinitis pigmentosa, dominant retinitis pigmentosa, dominant retinitis pigmentosa with choroidal involvement, recessive retinitis pigmentosa with para-arteriolar preservation of the RPE (PPRPE), recessive retinitis pigmentosa with posterior column ataxia (PCARP), recessive retinitis pigmentosa with erythrocytic microcytosis, syndromic recessive retinitis pigmentosa, recessive syndromic disease with retinitis pigmentosa, non-syndromic recessive retinitis pigmentosa, non-syndromic dominant retinitis pigmentosa, syndromic dominant retinitis pigmentosa, juvenile recessive retinitis pigmentosa, recessive retinitis pigmentosa and mental retardation, recessive retinitis pigmentosa with macular degeneration, severe early-onset recessive retinitis pigmentosa, recessive retinitis pigmentosa and skeletal anomalies, recessive retinitis pigmentosa and skeletal abnormalities, dominant retinitis pigmentosa with sensorineural deafness, recessive retinitis pigmentosa with hearing loss, recessive retinitis pigmentosa with hearing loss and additional disabilities, recessive retinitis pigmentosa with vitreal alterations, early onset with macular coloboma recessive retinitis pigmentosa, X-linked retinitis pigmentosa, recessive X-linked retinitis pigmentosa, dominant X-linked retinitis pigmentosa, severe X-linked retinitis pigmentosa, X-linked retinitis pigmentosa with mental retardation, X-linked retinitis pigmentosa with myopathy, Bardet-Biedl like retinitis pigmentosa, Bardet-Biedl like recessive retinitis pigmentosa, digenic retinitis pigmentosa, digenic retinitis pigmentosa with retinal outer segment membrane protein 1, digenic retinitis pigmentosa with PRPH2, recessive retinitis pigmentosa with early macular involvement, recessive deafness without retinitis pigmentosa, recessive congenital deafness without retinitis pigmentosa, recessive retinitis pigmentosa and recessive ataxia, recessive retinitis pigmentosa and dominant ataxia, mitochondrial retinitis pigmentosa, mitochondrial retinitis pigmentosa with developmental and neurological abnormalities, mitochondrial retinitis pigmentosa with progressive sensorineural hearing loss, mitochondrial retinitis pigmentosa with deafness and neurological abnormalities, Autosomal Dominant Retinitis Pigmentosa, Nonsyndromic Autosomal Dominant Retinitis Pigmentosa, Autosomal Recessive, Retinitis Pigmentosa, Nonsyndromic Autosomal Recessive Retinitis Pigmentosa, Retinal pigment epithelium (RPE), recessive RPE, dominant RPE, recessive RPE degeneration, dominant RPE degeneration, ataxia, recessive ataxia, dominant ataxia, Senior-Loken syndrome, recessive Senior-Loken syndrome, dominant Senior-Loken syndrome, nephronophthisis, recessive nephronophthisis, dominant nephronophthisis, adolescent recessive nephronophthisis, ciliopathy-related recessive nephronophthisis, juvenile nephronophthisis, juvenile recessive nephronophthisis, juvenile dominant nephronophthisis, Usher syndrome, Usher syndrome type I, Usher syndrome type II, Usher syndrome type III, recessive Usher syndrome, atypical recessive Usher syndrome, dominant Usher syndrome, type 2 recessive Usher syndrome, type 2a recessive Usher syndrome, type 3 recessive Usher syndrome, type 3-like recessive Usher syndrome, atypical recessive Usher syndrome, type 1 recessive Usher syndrome, type 1b recessive Usher syndrome, type 1d recessive Usher syndrome, type 1f recessive Usher syndrome, type 1J recessive Usher syndrome, type 1k recessive Usher syndrome, digenic Usher syndrome with CDH23, digenic Usher syndrome with PCDH15, Acadian recessive Usher syndrome, recessive atypical Usher syndrome (USH3-like), Leber congenital amaurosis, recessive Leber congenital amaurosis, dominant Leber congenital amaurosis, de novo Leber congenital amaurosis, dominant Leber congenital amaurosis and pituitary dysfunction, recessive Leber congenital amaurosis with myopathy, recessive Leber congenital amaurosis with severe childhood retinal dystrophy, mitochondrial Leber hereditary optic neuropathy, Leber hereditary optic neuropathy, optic atrophy, recessive optic atrophy, dominant optic atrophy, optic atrophy with ataxia, recessive optic atrophy with ataxia, dominant optic atrophy with ataxia, recessive optic atrophy with ataxia and 3-methylglutaconic aciduria, dominant optic atrophy with cataract, ataxia and areflexia, Kjer type dominant optic atrophy, dominant optic atrophy with sensorineural hearing loss, recessive cerebellar degeneration with optic atrophy, optic atrophy with deadness-dystonia syndrome, X-linked optic atrophy with deadness-dystonia syndrome, retinal dystrophy, recessive retinal dystrophy, dominant retinal dystrophy, inherited retinal dystrophy, early onset recessive retinal dystrophy, recessive syndromic retinal dystrophy, recessive non-syndromic retinal dystrophy, recessive syndromic and non-syndromic retinal dystrophy, recessive optic atrophy and retinal dystrophy, recessive retinal dystrophy and obesity, recessive retinal dystrophy and cerebellar dysplasia, syndromic recessive optic atrophy and retinal dystrophy, dominant retinal dystrophy with iris coloboma, spectrum of ciliopathies including retinal dystrophy, recessive spectrum of ciliopathies including retinal dystrophy, dominant spectrum of ciliopathies including retinal dystrophy, dominant optic atrophy with neuropathy and myopathy, dominant optic atrophy with intellectual disability and developmental delay, syndromic optic atrophy, non-syndromic optic atrophy, recessive non-syndromic optic atrophy, dominant non-syndromic optic atrophy, recessive syndromic optic atrophy, dominant syndromic optic atrophy, Charcot-Marie-Tooth disease, recessive Charcot-Marie-Tooth disease, dominant Charcot-Marie-Tooth disease, benign fleck retina, recessive benign fleck retina, dominant benign fleck retina, syndromic retinopathy, recessive syndromic retinopathy, dominant syndromic retinopathy, Batten disease, recessive Batten disease, dominant Batten disease, recessive Batten disease (ceroid-lipofuscinosis, neuronal 3), juvenile recessive Batten disease (ceroid-lipofuscinosis, neuronal 3), neuronal ceroid lipofuscinosis, recessive neuronal ceroid lipofuscinosis, recessive neuronal ceroid lipofuscinosis 1, dominant neuronal ceroid lipofuscinosis, Stargardt disease, recessive Stargardt disease, dominant Stargardt disease, juvenile Stargardt disease, late onset Stargardt disease, Stargardt-like macular dystrophy, recessive Stargardt-like macular dystrophy, dominant Stargardt-like macular dystrophy, macular dystrophy, recessive macular dystrophy, early onset macular dystrophy, adult onset macular dystrophy, early onset recessive macular dystrophy, adult onset recessive macular dystrophy, early adult onset recessive macular dystrophy, juvenile with hypotrichosis recessive macular dystrophy, dominant macular dystrophy, late onset dominant macular dystrophy, dominant macular dystrophy with lens zonules, bull's-eye dominant macular dystrophy, butterfly-shaped dominant macular dystrophy, age-related dominant macular dystrophy, benign concentric annular dominant macular dystrophy, vitelliform recessive macular dystrophy, vitelliform dominant macular dystrophy, atypical vitelliform dominant macular dystrophy, dominant adult vitelliform macular dystrophy, Stargardt-like dominant macular dystrophy, Stargardt type dominant macular dystrophy, North Carolina dominant macular dystrophy, North Carolina-like dominant macular dystrophy, North Carolina-like with progressive sensorineural hearing loss dominant macular dystrophy, cystoid dominant macular dystrophy, Best type dominant macular dystrophy, occult macular dystrophy, recessive occult macular dystrophy, dominant occult macular dystrophy, age-related familial macular dystrophy, X-linked atrophic macular dystrophy, recessive X-linked atrophic macular dystrophy, dominant X-linked atrophic macular dystrophy, mitochondrial macular pattern dystrophy with type II diabetes and deafness, fundus flavimaculatus, recessive fundus flavimaculatus, dominant fundus flavimaculatus, rod dystrophy, recessive rod dystrophy, dominant rod dystrophy, cone dystrophy, recessive cone dystrophy, dominant cone dystrophy, recessive cone dystrophy with supernormal rod electroretinogram, early onset recessive cone dystrophy, late onset recessive cone dystrophy, cone dystrophy 1, X-linked cone dystrophy 1, cone dystrophy 2, progressive cone dystrophy 2, X-linked progressive cone dystrophy 2, delayed cone adaptation, recessive delayed cone adaptation, dominant delayed cone adaptation, cone-rod dystrophy, recessive cone-rod dystrophy, dominant cone-rod dystrophy, isolated cone-rod dystrophy, progressive cone-rod dystrophy, X-linked cone-rod dystrophy, X-linked progressive cone-rod dystrophy, progressive dominant cone-rod dystrophy, cone-rod dystrophy and amelogenesis imperfecta syndrome, recessive cone-rod dystrophy and amelogenesis imperfecta syndrome, dominant cone-rod dystrophy and amelogenesis imperfecta syndrome, recessive cone-rod dystrophy with inner retinopathy, recessive cone-rod dystrophy with skeletal disease, congenital syndromic nonprogressive recessive cone-rod dystrophy, recessive cone-rod dystrophy with hearing loss, recessive cone-rod dystrophy with psychomotor delay, recessive cone and cone-rod dystrophy, cone-rod synaptic disease, congenital cone-rod synaptic disease, recessive congenital cone-rod synaptic disease, dominant congenital cone-rod synaptic disease, rod-cone dystrophy, recessive rod-cone dystrophy, dominant rod-cone dystrophy, early onset recessive rod-cone dystrophy, non-syndromic recessive rod-cone dystrophy, recessive Newfoundland rod-cone dystrophy, recessive progressive cone dystrophy, Stickler syndrome, dominant Stickler syndrome, recessive Stickler syndrome, dominant Stickler syndrome type I, dominant Stickler syndrome type II, Marshall syndrome, dominant Marshall syndrome, recessive Marshall syndrome, achromatopsia, recessive achromatopsia, dominant achromatopsia, recessive complete achromatopsia, recessive incomplete achromatopsia, macular degeneration, age-related macular degeneration, complex etiology age-related macular degeneration, isolated age-related macular degeneration, wet age-related macular degeneration, dry age-related macular degeneration, drusen, recessive drusen, dominant drusen, early-onset recessive drusen, early-onset dominant drusen, macular drusen, dominant radial macular drusen, pigmented paravenous chorioretinal atrophy, recessive pigmented paravenous chorioretinal atrophy, dominant pigmented paravenous chorioretinal atrophy, progressive Bifocal Chorioretinal Atrophy, Bardet-Biedl syndrome, recessive Bardet-Biedl syndrome, dominant Bardet-Biedl syndrome, recessive Bardet-Biedl syndrome with developmental anomalies, retinal degeneration, recessive retinal degeneration, dominant retinal degeneration, non-syndromic recessive retinal degeneration, Doyne honeycomb retinal degeneration, recessive Doyne honeycomb retinal degeneration, dominant Doyne honeycomb retinal degeneration (Malattia Leventinese), recessive nephronophthisis with retinal degeneration, Alström syndrome, recessive Alström syndrome, dominant Alström syndrome, Joubert syndrome, recessive Joubert syndrome, dominant Joubert syndrome, Jobert syndrome, recessive Jobert syndrome, dominant Jobert syndrome, X-linked Jobert syndrome, vitreoretinal degeneration, recessive vitreoretinal degeneration, dominant vitreoretinal degeneration, snowflake vitreoretinal degeneration, snowflake dominant vitreoretinal degeneration, Oguchi disease, recessive Oguchi disease, dominant Oguchi disease, night blindness, stationary night blindness, congenital night blindness, congenital stationary night blindness, severe congenital stationary night blindness, recessive congenital stationary night blindness, recessive complete congenital stationary night blindness, dominant congenital stationary night blindness, Nougaret type dominant congenital stationary night blindness, Oguchi type recessive congenital stationary night blindness, Riggs type recessive congenital stationary night blindness, Schubert-Bornschein type recessive congenital stationary night blindness, fundus albipunctatus type recessive congenital stationary night blindness, complete recessive congenital stationary night blindness, X-linked congenital stationary night blindness, incomplete X-linked congenital stationary night blindness, retinal vasculopathy, cerebral leukodystrophy, retinal vasculopathy with cerebral leukodystrophy, recessive retinal vasculopathy with cerebral leukodystrophy, dominant retinal vasculopathy with cerebral leukodystrophy, Aicardi-Goutiere syndrome, Aicardi-Goutiere syndrome 1, recessive Aicardi-Goutiere syndrome 1, dominant Aicardi-utiere syndrome 1, chilblain lupus, recessive chilblain lupus, dominant chilblain lupus, Martinique retinal dystrophy and retinitis pigmentosa, recessive Martinique retinal dystrophy and retinitis pigmentosa, dominant Martinique retinal dystrophy and retinitis pigmentosa, spinocerebellar ataxia, recessive spinocerebellar ataxia, dominant spinocerebellar ataxia, spinocerebellar ataxia with macular dystrophy, spinocerebellar ataxia with retinal degeneration, spinocerebellar ataxia with macular dystrophy or retinal degeneration, recessive spinocerebellar ataxia with macular dystrophy or retinal degeneration, dominant spinocerebellar ataxia with macular dystrophy or retinal degeneration, Wolfram syndrome, recessive Wolfram syndrome, dominant Wolfram syndrome, low frequency sensorineural hearing loss, recessive low frequency sensorineural hearing loss, dominant low frequency sensorineural hearing loss, oculoauricular syndrome, recessive oculoauricular syndrome, dominant oculoauricular syndrome, recessive renal, skeletal and retinal anomalies, recessive abetalipoproteinemia, microcephaly, recessive microcephaly, dominant microcephaly, growth failure and retinopathy recessive microcephaly, Bietti crystalline corneoretinal dystrophy, recessive Bietti crystalline corneoretinal dystrophy, dominant Bietti crystalline corneoretinal dystrophy, Wagner disease, erosive vitreoretinopathy, Wagner disease and erosive vitreoretinopathy, recessive Wagner disease and erosive vitreoretinopathy, dominant Wagner disease and erosive vitreoretinopathy, febrile convulsions, recessive febrile convulsions, dominant febrile convulsions, dominant/recessive febrile convulsions, choroidal dystrophy, recessive choroidal dystrophy, dominant choroidal dystrophy, central areolar choroidal dystrophy, dominant central areolar choroidal dystrophy, recessive central areolar choroidal dystrophy, epiphyseal dysplasia, recessive epiphyseal dysplasia, dominant epiphyseal dysplasia, multiple epiphyseal dysplasia, recessive multiple epiphyseal dysplasia, dominant multiple epiphyseal dysplasia, ichthyosis, recessive ichthyosis, dominant ichthyosis, quadriplegia and retardation recessive ichthyosis, chorioretinal atrophy, bifocal chorioretinal atrophy, progressive bifocal chorioretinal atrophy, recessive progressive bifocal chorioretinal atrophy, dominant progressive bifocal chorioretinal atrophy, Refsum disease, recessive Refsum disease, dominant Refsum disease, adult form recessive Refsum disease, infantile form recessive Refsum disease, retinal-cone dystrophy, recessive retinal-cone dystrophy, dominant retinal-cone dystrophy, retinal-cone dystrophy 1, recessive retinal-cone dystrophy 1, dominant retinal-cone dystrophy 1, tritanopia, recessive tritanopia, dominant tritanopia, mucopolysaccharidosis, recessive mucopolysaccharidosis, dominant mucopolysaccharidosis, achromatopsia Pingelapese, recessive achromatopsia Pingelapese, dominant achromatopsia Pingelapese, Klippel-Feil syndrome, recessive Klippel-Feil syndrome, dominant Klippel-Feil syndrome, microphthalmia, recessive microphthalmia, dominant microphthalmia, limb-girdle muscular dystrophy, recessive limb-girdle muscular dystrophy, dominant limb-girdle muscular dystrophy, short-rib thoracic dysplasia, recessive short-rib thoracic dysplasia, dominant short-rib thoracic dysplasia, polydactyly recessive short-rib thoracic dysplasia, retinal dystrophy recessive short-rib thoracic dysplasia, mental retardation, truncal obesity, retinal dystrophy, and micropenis (MORM) syndrome, recessive MORM syndrome, dominant MORM syndrome, spasticity and retinal degeneration recessive retardation, Cockayne syndrome, recessive Cockayne syndrome, dominant Cockayne syndrome, congenital retinal nonattachment, recessive nonsyndromal congenital retinal nonattachment, dominant nonsyndromal congenital retinal nonattachment, hemolytic anemia, nonspherocytic hemolytic anemia, recessive nonspherocytic hemolytic anemia, dominant nonspherocytic hemolytic anemia, hereditary neuropathy, hereditary neuropathy (Russe type), recessive hereditary neuropathy (Russe type), dominant hereditary neuropathy (Russe type), choroidal sclerosis, recessive choroidal sclerosis, dominant choroidal sclerosis, retinopathy, recessive retinopathy, dominant retinopathy, combined dominant and recessive retinopathy, diffuse dominant retinopathy, variable dominant retinopathy, diffuse and variable dominant retinopathy, microcephaly, recessive microcephaly, dominant microcephaly, lymphedema dominant microcephaly, chorioretinopathy dominant microcephaly, lymphedema and chorioretinopathy dominant microcephaly, chorioretinopathy, recessive chorioretinopathy, dominant chorioretinopathy, chorioretinopathy and microcephaly, recessive chorioretinopathy and microcephaly, dominant chorioretinopathy and microcephaly, renal-coloboma syndrome, recessive renal-coloboma syndrome, dominant renal-coloboma syndrome, non-syndromic deafness, recessive non-syndromic deafness, dominant non-syndromic deafness, gyrate atrophy, recessive gyrate atrophy, dominant gyrate atrophy, gyrate atrophy of the choroid and retina, vitreoretinopathy, exudative vitreoretinopathy, familial exudative vitreoretinopathy, recessive familial exudative vitreoretinopathy, dominant familial exudative vitreoretinopathy, dominant familial exudative vitreoretinopathy and Coats disease, neovascular inflammatory vitreoretinopathy, recessive neovascular inflammatory vitreoretinopathy, dominant neovascular inflammatory vitreoretinopathy, atrophia areata, recessive atrophia areata, dominant atrophia areata, Meckel syndrome, recessive Meckel syndrome, dominant Meckel syndrome, vitreoretinochoroidopathy, recessive vitreoretinochoroidopathy, dominant vitreoretinochoroidopathy, bestrophinopathy, recessive bestrophinopathy, dominant bestrophinopathy, high bone mass trait, recessive high bone mass trait, dominant high bone mass trait, osteoporosis-pseudoglioma syndrome, recessive osteoporosis-pseudoglioma syndrome, dominant osteoporosis-pseudoglioma syndrome, microphthalmos, recessive microphthalmos, dominant microphthalmos, retinal disease syndrome, recessive retinal disease syndrome, dominant retinal disease syndrome, microphthalmos and retinal disease syndrome, recessive microphthalmos and retinal disease syndrome, dominant microphthalmos and retinal disease syndrome, nanophthalmos, recessive nanophthalmos, dominant nanophthalmos, bone dysplasias, recessive bone dysplasias, dominant bone dysplasias, developmental disorders, osteoarthritic diseases and syndromic disorders, cavitary optic disc anomalies, recessive cavitary optic disc anomalies, dominant cavitary optic disc anomalies, fundus albipunctatus, recessive fundus albipunctatus, dominant fundus albipunctatus, mevalonic aciduria, recessive mevalonic aciduria, dominant mevalonic aciduria, hyper-IgD syndrome, recessive hyper-IgD syndrome, dominant hyper-IgD syndrome, spastic paraplegia, recessive spastic paraplegia, dominant spastic paraplegia, neuropathy recessive spastic paraplegia, optic atrophy recessive spastic paraplegia, neuropathy and optic atrophy recessive spastic paraplegia (dementia), recessive dementia, dominant dementia, familial dominant dementia, retinoblastoma, recessive retinoblastoma, dominant retinoblastoma, germline retinoblastoma, somatic retinoblastoma, dominant germline or somatic retinoblastoma, retinoma, benign retinoma, pinealoma, osteogenic sarcoma, rod monochromacy, recessive rod monochromacy, dominant rod monochromacy, achromatopsia, recessive achromatopsia, dominant achromatopsia, rod achromatopsia, rod recessive achromatopsia, rod dominant achromatopsia, recessive rod monochromacy or achromatopsia, pattern dystrophy, recessive pattern dystrophy, dominant pattern dystrophy, S-cone syndrome, enhanced S-cone syndrome (ESC), recessive ESC, dominant ESC, Goldmann-Favre syndrome, recessive Goldmann-Favre syndrome, dominant Goldmann-Favre syndrome, Bothnia dystrophy, recessive Bothnia dystrophy, dominant Bothnia dystrophy, retinitis punctata albescens, recessive retinitis punctata albescens, dominant retinitis punctata albescens, mucolipidosis III gamma, recessive mucolipidosis III gamma, dominant mucolipidosis III gamma, Mainzer-Saldino syndrome, recessive Mainzer-Saldino syndrome, dominant Mainzer-Saldino syndrome, pseudoxanthoma elasticum, recessive pseudoxanthoma elasticum, dominant pseudoxanthoma elasticum, Knobloch syndrome, recessive Knobloch syndrome, dominant Knobloch syndrome, foveal hypoplasia, recessive foveal hypoplasia, dominant foveal hypoplasia, anterior segment dysgenesis, recessive anterior segment dysgenesis, dominant anterior segment dysgenesis, foveal hypoplasia and anterior segment dysgenesis, recessive foveal hypoplasia and anterior segment dysgenesis, dominant foveal hypoplasia and anterior segment dysgenesis, spastic ataxia, recessive spastic ataxia, dominant spastic ataxia, de Grouchy syndrome, Boucher-Neuhauser syndrome, recessive Boucher-Neuhauser syndrome, dominant Boucher-Neuhauser syndrome, Boucher-Neuhauser syndrome with chorioretinal dystrophy, recessive Boucher-Neuhauser syndrome with chorioretinal dystrophy, dominant Boucher-Neuhauser syndrome with dystrophy, chorioretinal hypoprebetalipoproteinemia, acanthocytosis, retinitis pigmentosa, and palladial (HARP), degeneration, recessive HARP degeneration, dominant HARP degeneration, Hallervorden-Spatz syndrome, recessive Hallervorden-Spatz syndrome, dominant Hallervorden-Spatz syndrome, Alagille syndrome, recessive Alagille syndrome, dominant Alagille syndrome, polyneuropathy, hearing loss, ataxia, retinitis pigmentosa and early-onset cataract (PHARC), recessive PHARC, dominant PHARC, recessive syndromic PHARC, Sorsby's fundus dystrophy, recessive Sorsby's fundus dystrophy, dominant Sorsby's fundus dystrophy, vitreoretinal dystrophy, recessive vitreoretinal dystrophy, dominant vitreoretinal dystrophy, optic neuropathy, recessive optic neuropathy, dominant optic neuropathy, late onset dominant optic neuropathy, orofaciodigital syndrome 1, Simpson-Golabi-Behmel syndrome 2, X-linked retinoschisis, X-linked Oregon eye disease, X-linked optic atrophy, retinal dysplasia, recessive retinal dysplasia, dominant retinal dysplasia, X-linked retinal dysplasia, primary X-linked retinal dysplasia, X-linked Norrie disease, Coats disease, X-linked Åland Island eye disease, Autoimmune Inner Ear Disease (AIED), AIED-like disease, choroideremia, X-linked choroideremia, neuropathy, optic atrophy, deafness and retinitis pigmentosa, X-linked neuropathy, optic atrophy, deafness and retinitis pigmentosa, X-linked blue cone monochromacy, X-linked protanomaly and rare macular dystrophy in blue cone monochromacy (BCM), X-linked deuteranomaly and rare macular dystrophy in blue cone monochromacy (BCM), mitochondrial Kearns-Sayre syndrome including retinal pigmentary degeneration, Leigh syndrome, retinopathy, mitochondrial pigmentary retinopathy and sensorineural hearing loss, ocular albinism, oculocutaneous albinism, Neuronal ceroid lipofuscinoses, Zellweger spectrum disorder, Cobalamin C deficiency, blue-cone monochromatism, hereditary red-green color vision defects, tritan and yellow-blue defects, bradyopsia, delayed cone adaptation, Uveitis, Diabetic Retinopathy, Diabetic Macular Edema, Persistent Corneal Epithelial Defect, Neurotrophic Keratitis, Herpes Stromal Keratitis, Chronic Dry Eye, Glaucoma, ocular abrasion, ocular blistering, ocular scarring, vision loss, blindness, corneal blindness, dry eye disease, aqueous deficiency dry eye disease, Sjögren's syndrome-related aqueous deficiency dry eye disease, non-Sjögren's syndrome-related dry eye disease, evaporative dry eye disease, meibomian gland dysfunction, blepharitis, lid margin inflammation, ocular rosacea and atopy, aqueous deficiency and evaporative dry eye disease, Fuchs dystrophy, Fuchs endothelial corneal dystrophy (FECD), Fuchs endothelial dystrophy (FED), panuveitis, diffuse uveitis, total uveitis, cataract, partial cataracts, complete cataracts, stationary cataracts, progressive cataracts, hard cataracts, soft cataracts, nuclear cataracts, nuclear sclerosis cataracts, cortical cataracts, posterior subcapsular cataracts, congenital cataracts, corneal dystrophy, Epithelial and subepithelial dystrophies, Epithelial basement membrane dystrophy, Epithelial recurrent erosion dystrophies (Franceschetti corneal dystrophy, Dystrophia Smolandiensis, and/or Dystrophia Helsinglandica), Subepithelial mucinous corneal dystrophy, Meesmann corneal dystrophy, Lisch epithelial corneal dystrophy, Gelatinous drop-like corneal dystrophy, Bowman Layer dystrophies, Reis-Bücklers corneal dystrophy, Thiel-Behnke corneal dystrophy, Stromal dystrophies-TGFB1 corneal dystrophies, Lattice corneal dystrophy, type 1 variants (III, IIIA, I/IIIA, IV) of lattice corneal dystrophy, Granular corneal dystrophy, type 1, Granular corneal dystrophy, type 2, Stromal dystrophies, Macular corneal dystrophy, Schnyder crystalline corneal dystrophy, Congenital stromal corneal dystrophy, Fleck corneal dystrophy, Posterior amorphous corneal dystrophy, Central cloudy dystrophy of François, Pre-Descemet corneal dystrophy, Endothelial dystrophies, Fuchs' dystrophy, Posterior polymorphous corneal dystrophy, Congenital hereditary endothelial dystrophy, X-linked endothelial corneal dystrophy, Superficial dystrophies, Epithelial basement membrane dystrophy, Meesmann juvenile epithelial corneal dystrophy, Gelatinous drop-like corneal dystrophy, Lisch epithelial corneal dystrophy, Subepithelial mucinous corneal dystrophy, Reis-Bucklers corneal dystrophy, Thiel-Behnke dystrophy, Stromal dystrophies, Lattice corneal dystrophy, Granular corneal dystrophy, Macular corneal dystrophy, Schnyder crystalline corneal dystrophy, Congenital stromal corneal dystrophy, Fleck corneal dystrophy, Posterior dystrophies, Fuchs' dystrophy, Posterior polymorphous corneal dystrophy, Congenital hereditary endothelial dystrophy, keratopathy, band keratopathy, corneal band keratopathy, and calcific band keratopathy. In some embodiments, the eye condition or disease is Stargardt syndrome. In some embodiments, the eye condition or disease is neurotrophic keratitis. In some embodiments, the eye condition or disease is Leber congenital amaurosis. In some embodiments that may be combined with any of the preceding embodiments, the subject is a human. In some embodiments that may be combined with any of the preceding embodiments, the herpes virus or pharmaceutical composition is administered via injection, via injection to the eye, via subretinal injection, via intraocular injection, via intravitreal injection, intraocularly, intravitreally, topically, subcutaneously, subconjunctivally, subtenonly, intracamerally, retrobulbarly, systemically, parenterally, periocularly, juxtasclerally, anterior juxtasclerally, posterior juxtasclerally, orally, peribulbarly, or suprachoroidally to the subject.

[0023] Other aspects of the present disclosure relate to a method of delivering a polypeptide to one or more cells of the eye a subject comprising administering to the subject a pharmaceutical composition comprising (a) a herpes virus comprising a recombinant herpes virus genome, wherein the recombinant herpes virus genome comprises one or more polynucleotides encoding the polypeptide, and (b) a pharmaceutically acceptable carrier. In some embodiments, the subject suffers from a disease or condition affecting one or more cells of the eye.

[0024] In some embodiments that may be combined with any of the preceding embodiments, the herpes virus is a pseudotyped virus. In some embodiments that may be combined with any of the preceding embodiments, the herpes virus is not a pseudotyped virus. In some embodiments that may be combined with any of the preceding embodiments, the herpes virus is not a pseudotyped oncolytic virus.

[0025] Other aspects of the present disclosure relate to an article of manufacture or kit comprising any of the recombinant nucleic acids, viruses, medicaments, and/or pharmaceutical compositions or formulations described herein and instructions for administration thereof.

### BRIEF DESCRIPTION OF THE DRAWINGS

[0026] The patent or application file contains at least one drawing executed in color. Copies of this patent or patent application publication with color drawings will be provided by the Office upon request and payment of the necessary fee.

[0027] FIGS. 1A-11 show schematics of wild-type and modified herpes simplex virus genomes. FIG. 1A shows a wild-type herpes simplex virus genome. FIG. 1B shows a modified herpes simplex virus genome comprising deletions of the coding sequence of ICP4 (both copies), with an expression cassette containing a nucleic acid encoding a polypeptide integrated at each of the ICP4 loci. FIG. 1C shows a modified herpes simplex virus genome comprising deletions of the coding sequences of ICP4 (both copies) and UL41, with an expression cassette containing a nucleic acid encoding a polypeptide integrated at each of the ICP4 loci. FIG. 1D shows a modified herpes simplex virus genome comprising deletions of the coding sequences of ICP4 (both copies) and UL41, with an expression cassette containing a nucleic acid encoding a polypeptide integrated at the UL41 locus. FIG. 1E shows a modified herpes simplex virus genome comprising deletions of the coding sequences of ICP4 (both copies) and ICP22, with an expression cassette containing a nucleic acid encoding a polypeptide integrated at each of the ICP4 loci. FIG. 1F shows a modified herpes simplex virus genome comprising deletions of the coding sequences of ICP4 (both copies) and ICP22, with an expression cassette containing a nucleic acid encoding a polypeptide integrated at the ICP22 locus. FIG. 1G shows a modified herpes simplex virus genome comprising deletions of the coding sequences of ICP4 (both copies), UL41, and ICP22, with an expression cassette containing a nucleic acid encoding a polypeptide integrated at each of the ICP4 loci. FIG. 1H shows a modified herpes simplex virus genome comprising deletions of the coding sequences of ICP4 (both copies), UL41, and ICP22, with an expression cassette containing a nucleic acid encoding a polypeptide integrated at the UL41 locus. FIG. 1I shows a modified herpes simplex virus genome comprising deletions of the coding sequences of ICP4 (both copies), UL41, and ICP22, with an expression cassette containing a nucleic acid encoding a polypeptide integrated at the ICP22 locus.

[0028] FIG. 2 depicts vector genome quantitation via qPCR in murine plasma samples harvested 24 hours after intracameral, suprachoroidal, intravitreal, or subretinal HSV-mCherry administration. Data are presented as mean±standard error of the mean (SEM), n=3 per group.

[0029] FIGS. 3A-3F show histology by H&E staining (FIG. 3A) and the in vivo expression of a fluorescent reporter 24 hours after intracameral administration of HSV-mCherry (FIGS. 3B-3F). mCherry (red) was co-stained with DAPI (nuclei marker; blue), and/or N-cadherin (corneal endothelial cell marker; green).

[0030] FIGS. 4A-4G depict the in vivo expression of a fluorescent reporter 24 hours after suprachoroidal administration of HSV-mCherry (FIGS. 4A-4F) and histology by H&E staining (FIG. 4G). mCherry (red) was co-stained with DAPI (nuclei marker; blue), rhodopsin (RHO; photoreceptor marker; green), and/or isomerophydrolase/RPE65 (retinal pigment epithelial cell (RPEC) marker; green).

[0031] FIGS. 5A-5F show the in vivo expression of a fluorescent reporter 24 hours after intravitreal administration of HSV-mCherry (FIGS. 5A-5E) and histology by H&E staining (FIG. 5F). mCherry (red) was co-stained with DAPI (nuclei marker; blue), and/or N-cadherin (corneal endothelial cell marker; green).

[0032] FIGS. 6A-6G depict the in vivo expression of a fluorescent reporter 24 hours after subretinal administration of HSV-mCherry (FIGS. 6A-6F) and histology by H&E staining (FIG. 6G). mCherry (red) was co-stained with DAPI (nuclei marker; blue), rhodopsin (RHO; photoreceptor marker; green), and/or isomerophydrolase/RPE65 (retinal pigment epithelial cell (RPEC) marker; green).

[0033] FIGS. 7A-7D show genome (qPCR) and transcript (qTR-PCR) levels in primary corneal epithelial cells 24 hours post infection (hpi) (FIGS. 7A-7B) or 48 hours hpi (FIGS. 7C-7D) with a modified herpes simplex virus encoding proNGF (HSV-proNGF; FIGS. 7A & 7C) or beta-NGF (HSV-sNGF; FIGS. 7B-7D) transgene at a multiplicity of infection (MOI) of 1 or 4. Data indicative of cells assayed in duplicate, and data are presented as mean±standard error of the mean (SEM), n=1.

[0034] FIGS. 8A-8B depict western blot detection of human beta-NGF in uninfected control cell media (mock) or primary corneal epithelial cell media infected with a modified herpes simplex virus encoding proNGF (HSV-proNGF) transgene at a multiplicity of infection (MOI) of 1 or 4. Recombinant human beta-NGF was used as a positive control. FIGS. 8A-8B: lane 1 recombinant human beta-NGF; lane 2 ladder; lane 3 mock; lane 4 HSV-proNGF MOI 1; lane 5 HSV-proNGF MOI 4. FIG. 8A: 8-10 ng of total protein was loaded in lanes 4-5. FIG. 8B: 115-140 ng of total protein was loaded in lanes 4-5 from concentrated infected primary corneal epithelial cell media.

[0035] FIGS. 9A-9B show secreted human beta-NGF from primary corneal epithelial cells 48 hours post infection (hpi) with a modified herpes simplex virus encoding proNGF (HSV-proNGF; FIG. 9A) or beta-NGF (HSV-sNGF; FIG. 9B) transgene at a multiplicity of infection (MOI) of 1 or 4 analyzed by ELISA. Data indicative of cells assayed in duplicate, and data are presented as mean±standard error of the mean (SEM), n=1.

[0036] FIGS. 10A-10B depict viability of primary corneal epithelial cells 24 hours post infection (hpi) or 48 hours hpi with a modified herpes simplex virus encoding proNGF (HSV-proNGF; FIG. 10A) or beta-NGF (HSV-sNGF; FIG. 10B) transgene at a multiplicity of infection (MOI) of 0, 0.5, 1, or 3 analyzed by Mosmann's Tetrazolium Toxicity (MTT). Data indicative of cells assayed in triplicate, and data are presented as mean±standard error of the mean (SEM), n=1.

[0037] FIGS. 11A-11B show cell proliferation (analyzed by a Cell Titer assay) in TF-1 cells 72 hours post treatment with varying concentrations of beta-NGF derived from HEK-293T cells infected with (MOI of 4) a modified herpes simplex virus encoding proNGF (HSV-proNGF; FIG. 11A) or beta-NGF (HSV-sNGF; FIG. 11B) transgene. Media alone and recombinant human beta-NGF served as controls. Data indicative of cells assayed in triplicate, and data are presented as mean±standard error of the mean (SEM), n=1.

[0038] FIGS. 12A-12C depict corneal fluorescein staining of eyes immediately after corneal wounding (FIG. 12A 1 mm mechanical corneal wound; FIG. 12B 1 mm deeper mechanical corneal wound penetrating into stroma; FIG. 12C Cross hatch needle scratch wound).

[0039] FIGS. 13A-13C show histology by H&E staining 24 hours after corneal wounding and HSV-mCherry infection (FIG. 13A 1 mm mechanical corneal wound; FIG. 13B 1 mm deeper mechanical corneal wound; FIG. 13C Cross hatch needle scratch wound).

[0040] FIGS. 14A-14D depict genome (qPCR; FIGS. 14A & 14C) and transcript (qRT-PCR; FIGS. 14B & 14D) in corneal epithelium (FIGS. 14A-14B) or whole eye minus the corneal epithelium (FIGS. 14C-14D) 24 hours after topical application of HSV-mCherry to wounded eyes. Data are presented as mean±standard error of the mean (SEM), n=3 eyes per group.

[0041] FIGS. 15A-15C show the in vivo expression of a fluorescent reporter 24 hours after corneal wounding and subsequent topical administration of HSV-mCherry (FIG. 15A 1 mm mechanical corneal wound; FIG. 15B 1 mm deeper mechanical corneal wound; FIG. 15C Cross hatch needle scratch wound). mCherry (red) was co-stained with DAPI (nuclei marker; blue).

[0042] FIG. 16 depicts HSV-ABCA4 transduction and ABCA4 transgene expression in transduced healthy human ARPE-19 cells (primary retinal pigment epithelial cells). Data are presented as the average of duplicates±standard error of the mean (SEM).

[0043] FIG. 17 shows dose-dependent (multiplicity of infection (MOI) of 0 (mock), 0.05, 0.1, 0.5, 1, or 3) ABCA4 protein expression in HSV-ABCA4 transduced healthy human ARPE-19 cells.

[0044] FIGS. 18A-18B depict dose-dependent cytotoxicity assessments in HSV-ABCA4 transduced healthy human ARPE-19 cells at 24 (FIG. 18A) or 48 (FIG. 18B) hours post infection, analyzed by Mosmann's Tetrazolium Toxicity (MTT). Data are presented as the average of triplicates±standard error of the mean (SEM).

[0045] FIGS. 19A-19C depict human ABCA4 expression analysis in eyes harvested from vehicle control (FIG. 19A) and HSV-ABCA4 (FIG. 19B) treated Abca4^{-/-} mice 24 hours post suprachoroidal injection, as compared to endogenous ABCA4 in wild-type rodent eyes (FIG. 19C). Representative images of immunofluorescence (IF) staining of ABCA4 in rodent eyes. Two HSV-ABCA4 treated mice are shown. Panels were imaged at 20× magnification. Nuclei were visualized via DAPI staining. ONL=outer nuclear layer.

[0046] FIGS. 20A-20B show co-immunofluorescence staining of eye sections from vehicle control (FIG. 20A) and HSV-ABCA4 (FIG. 20B) treated Abca4^{-/-} mice 24 hours post suprachoroidal injection. Representative images of IF staining of human ABCA4 (red) and murine rhodopsin (RHO) (green) in Abca4^{-/-} mouse eyes. Panels were images at 20× magnification. Nuclei were visualized via DAPI staining (blue). ONL=outer nuclear layer.

[0047] FIGS. 21A-21H depict histology of eye sections from vehicle control (FIGS. 21 A & 21 E) and HSV-ABCA4 (FIGS. 21B-21D and 21F-21H) treated Abca4−/− mice 24 hours post suprachoroidal injection. Representative images of hematoxylin and eosin (H&E) stained mouse eyes. FIGS. 21A-21D were imaged at 5× magnification and FIGS. 21E-21H were imaged at 20× magnification.

[0048] FIGS. 22A-22C: slit-lamp pictures of the eye before surgery (FIG. 22A) and at 8 months after surgery and ophthalmic HSV-COL7 treatment (FIG. 22B). FIG. 22C shows anterior segment optical coherence tomography (OCT) images of the corneal epithelium.

[0049] FIG. 23 depicts the serial assessment of visual acuity in a patient's right eye following topical application of HSV-COL7.

### DETAILED DESCRIPTION

[0050] The following description sets forth exemplary methods, parameters, and the like. It should be recognized, however, that such a description is not intended as a limitation on the scope of the present disclosure but is instead provided as a description of exemplary embodiments.

### I. General Techniques

[0051] The techniques and procedures described or referenced herein are generally well understood and commonly employed using conventional methodology by those skilled in the art, such as, for example, the widely utilized methodologies described in Sambrook et al., Molecular Cloning: A Laboratory Manual 3d edition (2001) Cold Spring Harbor Laboratory Press, Cold Spring Harbor, N.Y.; Current Protocols in Molecular Biology (F. M. Ausubel, et al. eds., (2003)); the series Methods in Enzymology (Academic Press, Inc.): PCR 2: A Practical Approach (M. J. MacPherson, B. D. Hames and G. R. Taylor eds. (1995)), Harlow and Lane, eds. (1988); Oligonucleotide Synthesis (M. J. Gait, ed., 1984); Methods in Molecular Biology, Humana Press; Cell Biology: A Laboratory Notebook (J. E. Cellis, ed., 1998) Academic Press; Animal Cell Culture (R. I. Freshney), ed., 1987); Introduction to Cell and Tissue Culture (J. P. Mather and P. E. Roberts, 1998) Plenum Press; Cell and Tissue Culture: Laboratory Procedures (A. Doyle, J. B. Griffiths, and D. G. Newell, eds., 1993-8) J. Wiley and Sons; Gene Transfer Vectors for Mammalian Cells (J. M. Miller and M. P. Calos, eds., 1987); PCR: The Polymerase Chain Reaction, (Mullis et al., eds., 1994); Short Protocols in Molecular Biology (Wiley and Sons, 1999).

### II. Definitions

[0052] Before describing the present disclosure in detail, it is to be understood that the present disclosure is not limited to particular compositions or biological systems, which can, of course, vary. It is also to be understood that the terminology used herein is for the purpose of describing particular embodiments only and is not intended to be limiting.

[0053] As used herein, the singular forms “a”, “an” and “the” include plural referents unless the content clearly dictates otherwise. Thus, for example, reference to “a molecule” optionally includes a combination of two or more such molecules, and the like.

[0054] As used herein, the term “and/or” may include any and all combinations of one or more of the associated listed items. For example, the term “a and/or b” may refer to “a alone”, “b alone”, “a or b”, or “a and b”; the term “a, b, and/or c” may refer to “a alone”, “b alone”, “c alone”, “a or b”, “a or c”, “b or c”, “a, b, or c”, “a and b”, “a and c”, “b and c”, or “a, b, and c”; etc.

[0055] As used herein, the term “about” refers to the usual error range for the respective value readily known to the skilled person in this technical field. Reference to “about” a value or parameter herein includes (and describes) embodiments that are directed to that value or parameter per se.

[0056] It is understood that aspects and embodiments of the present disclosure include “comprising”, “consisting”, and “consisting essentially of” aspects and embodiments.

[0057] As used herein, the terms “polynucleotide”, “nucleic acid sequence”, “nucleic acid”, and variations thereof shall be generic to polydeoxyribonucleotides (containing 2-deoxy-D-ribose), to polyribonucleotides (containing D-ribose), to any other type of polynucleotide that is an N-glycoside of a purine or pyrimidine base, and to other polymers containing non-nucleotidic backbones, provided that the polymers contain nucleobases in a configuration that allows for base pairing and base stacking, as found in DNA and RNA. Thus, these terms include known types of nucleic acid sequence modifications, for example, substitution of one or more of the naturally occurring nucleotides with an analog, and inter-nucleotide modifications.

[0058] As used herein, a nucleic acid is “operatively linked” or “operably linked” when it is placed into a functional relationship with another nucleic acid sequence. For example, a promoter or enhancer is operably linked to a coding sequence if it affects the transcription of the sequence, or a ribosome binding site is operably linked to a coding sequence if it is positioned so as to facilitate translation. Generally, “operatively linked” or “operably linked” means that the DNA or RNA sequences being linked are contiguous.

[0059] As used herein, the term “vector” refers to discrete elements that are used to introduce heterologous nucleic acids into cells for either expression or replication thereof. An expression vector includes vectors capable of expressing nucleic acids that are operatively linked with regulatory sequences, such as promoter regions, that are capable of effecting expression of such nucleic acids. Thus, an expression vector may refer to a DNA or RNA construct, such as a plasmid, a phage, recombinant virus, or other vector that, upon introduction into an appropriate host cell, results in expression of the nucleic acids. Appropriate expression vectors are well known to those of skill in the art and include those that are replicable in eukaryotic cells and those that remain episomal or those which integrate into the host cell genome.

[0060] As used herein, an “open reading frame” or “ORF” refers to a continuous stretch of nucleic acids, either DNA or RNA, that encode a protein or polypeptide. Typically, the nucleic acids comprise a translation start signal or initiation codon, such as ATG or AUG, and a termination codon.

[0061] As used herein, an “untranslated region” or “UTR” refers to untranslated nucleic acids at the 5′ and/or 3′ ends of an open reading frame. The inclusion of one or more UTRs in a polynucleotide may affect post-transcriptional regulation, mRNA stability, and/or translation of the polynucleotide.

[0062] As used herein, the term “transgene” refers to a polynucleotide that is capable of being transcribed into RNA and translated and/or expressed under appropriate conditions after being introduced into a cell. In some aspects, it confers a desired property to a cell into which it was introduced, or otherwise leads to a desired therapeutic or diagnostic outcome.

[0063] As used herein, the terms “polypeptide,” “protein,” and “peptide” are used interchangeably and may refer to a polymer of two or more amino acids.

[0064] As used herein, a “subject”, “host”, or an “individual” refers to any animal classified as a mammal, including humans, domestic and farm animals, and zoo, sports, or pet animals, such as dogs, horses, cats, cows, as well as animals used in research, such as mice, rats, hamsters, rabbits, and non-human primates, etc. In some embodiments, the mammal is human.

[0065] As used herein, the terms “pharmaceutical formulation” or “pharmaceutical composition” refer to a preparation which is in such a form as to permit the biological activity of the active ingredient(s) to be effective, and which contains no additional components which are unacceptably toxic to a subject to which the composition or formulation would be administered. “Pharmaceutically acceptable” excipients (e.g., vehicles, additives) are those which can reasonably be administered to a subject mammal to provide an effective dose of the active ingredient(s) employed.

[0066] As used herein, an “effective amount” is at least the minimum amount required to affect a measurable improvement or prevention of one or more symptoms of a particular disorder. An “effective amount” may vary according to factors such as the disease state, age, sex, and weight of the patient. An effective amount is also one in which any toxic or detrimental effects of the treatment are outweighed by the therapeutically beneficial effects. For prophylactic use, beneficial or desired results include results such as eliminating or reducing the risk, lessening the severity, or delaying the onset of the disease, its complications and intermediate pathological phenotypes presenting during development of the disease. For therapeutic use, beneficial or desired results include clinical results such as decreasing one or more symptoms resulting from the disease, increasing the quality of life of those suffering from the disease, decreasing the dose of other medications used to treat symptoms of the disease, delaying the progression of the disease, and/or prolonging survival. An effective amount can be administered in one or more administrations. For purposes of the present disclosure, an effective amount of a recombinant nucleic acid, virus, and/or pharmaceutical composition is an amount sufficient to accomplish prophylactic or therapeutic treatment either directly or indirectly. As is understood in the clinical context, an effective amount of a recombinant nucleic acid, virus, and/or pharmaceutical composition may or may not be achieved in conjunction with another drug, compound, or pharmaceutical composition. Thus, an “effective amount” may be considered in the context of administering one or more therapeutic agents, and a single agent may be considered to be given in an effective amount if, in conjunction with one or more other agents, a desirable result may be or is achieved.

[0067] As used herein, “treatment” refers to clinical intervention designed to alter the natural course of the individual or cell being treated during the course of clinical pathology. Desirable effects of treatment include decreasing the rate of disease/disorder/defect progression, ameliorating, or palliating the disease/disorder/defect state, and remission or improved prognosis.

[0068] As used herein, the term “delaying progression of” a disease/disorder/defect refers to deferring, hindering, slowing, retarding, stabilizing, and/or postponing development of the disease/disorder/defect. This delay can be of varying lengths or time, depending on the history of the disease/disorder/defect and/or the individual being treated. As is evident to one of ordinary skill in the art, a sufficient or significant delay can, in effect, encompass prevention, in that the individual does not develop the disease.

### III. Recombinant Nucleic Acids

[0069] Certain aspects of the present disclosure relate to recombinant nucleic acids (e.g., isolated recombinant nucleic acids) comprising one or more (e.g., one or more, two or more, three or more, four or more, five or more, ten or more, etc.) polynucleotides encoding a polypeptide. In some embodiments, the recombinant nucleic acid comprises one polynucleotide encoding a polypeptide. In some embodiments, the recombinant nucleic acid comprises two polynucleotides encoding a polypeptide. In some embodiments, the recombinant nucleic acid comprises three or more polynucleotides encoding a polypeptide. In some embodiments, the recombinant nucleic acid comprises one or more polynucleotides encoding two or more polypeptides. In some embodiments, the recombinant nucleic acid comprises two or more polynucleotides encoding two or more polypeptides. In some embodiments, the two or more polypeptides are identical. In some embodiments, the two or more polypeptides are different.

[0070] In some embodiments, the present disclosure relates to recombinant nucleic acids comprising a polynucleotide encoding a chimeric polypeptide comprising: a first polypeptide, a linker polypeptide, and a second polypeptide. In some embodiments, the first and second polypeptides are the same. In some embodiments, the first and second polypeptides are different. In some embodiments, the linker polypeptide is a cleavable linker polypeptide. In some embodiments, the linker polypeptide is a non-cleavable linker polypeptide.

[0071] In some embodiments, the recombinant nucleic acid is a vector. In some embodiments, the recombinant nucleic acid is a viral vector. In some embodiments, the recombinant nucleic acid is a herpes viral vector. In some embodiments, the recombinant nucleic acid is a herpes simplex virus amplicon. In some embodiments, the recombinant nucleic acid is a recombinant herpes virus genome. In some embodiments, the recombinant herpes virus genome is a recombinant herpes simplex virus genome. In some embodiments, the recombinant herpes simplex virus genome is a recombinant herpes simplex virus type 1 (HSV-1) genome.

### Polynucleotides Encoding Polypeptides

[0072] In some embodiments, the present disclosure relates to recombinant nucleic acids comprising one or more polynucleotides encoding one or more polypeptides (e.g., one or more human polypeptides). Any suitable polypeptide described herein or known in the art may be encoded by a polynucleotide of the present disclosure, including, for example, human polypeptides.

[0073] In some embodiments, a polynucleotide of the present disclosure comprises the wild-type coding sequence of any gene described herein or known in the art (including any isoform thereof). In some embodiments, a polynucleotide of the present disclosure comprises a codon-optimized variant of the wild-type coding sequence of any gene described herein or known in the art. In some embodiments, use a of a codon-optimized variant of the coding sequence of a gene increases stability and/or yield of heterologous expression (RNA and/or protein) of the encoded polypeptide in a target cell, as compared to the stability and/or yield of heterologous expression of a corresponding, non-codon-optimized, wild-type sequence. Any suitable method known in the art for performing codon optimization of a sequence for expression in one or more target cells (e.g., one or more human cells) may be used, including, for example, by the methods described by Fath et al. (PLOS One. 2011 Mar. 3; 6 (3): e17596).

[0074] In some embodiments, the present disclosure relates to a recombinant nucleic acid comprising one or more polynucleotides comprising the coding sequence of a human gene. Any suitable human gene (including any isoform thereof) known in the art may be encoded by a polynucleotide of the present disclosure, including, for example a SAMD11 gene (see e.g., NCBI Gene ID: 148398; SEQ ID NO: 378), a NPHP4 gene (see e.g., NCBI Gene ID: 261734; SEQ ID NO: 379), a ESPN gene (see e.g., NCBI Gene ID: 83715; SEQ ID NO: 380), a NMNAT1 gene (see e.g., NCBI Gene ID: 64802; SEQ ID NO: 381), a MFN2 gene (see e.g., NCBI Gene ID: 9927; SEQ ID NO: 382), a EMC1 gene (see e.g., NCBI Gene ID: 23065; SEQ ID NO: 383), a PLA2G5 gene (see e.g., NCBI Gene ID: 5322; SEQ ID NO: 384), a DHDDS gene (see e.g., NCBI Gene ID: 79947; SEQ ID NO: 385), a PPT1 gene (see e.g., NCBI Gene ID: 5538; SEQ ID NO: 386), a ELOVL1 gene (see e.g., NCBI Gene ID: 64834; SEQ ID NO: 387), a POMGNT1 gene (see e.g., NCBI Gene ID: 55624; SEQ ID NO: 388), a RPE65 gene (see e.g., NCBI Gene ID: 6121; SEQ ID NO: 389), a ABCA4 gene (see e.g., NCBI Gene ID: 24; SEQ ID NO: 390), a COL11A1 gene (see e.g., NCBI Gene ID: 1301; SEQ ID NO: 391), a GNAT2 gene (see e.g., NCBI Gene ID: 2780; SEQ ID NO: 392), a CLCC1 gene (see e.g., NCBI Gene ID: 23155; SEQ ID NO: 393), a DRAM2 gene (see e.g., NCBI Gene ID: 128338; SEQ ID NO: 394), a PRPF3 gene (see e.g., NCBI Gene ID: 9129; SEQ ID NO: 395), a ENSA gene (see e.g., NCBI Gene ID: 2029; SEQ ID NO: 396), a SEMA4A gene (see e.g., NCBI Gene ID: 64218; SEQ ID NO: 397), a ATF6 gene (see e.g., NCBI Gene ID: 22926; SEQ ID NO: 398), a HMCN1 gene (see e.g., NCBI Gene ID: 83872; SEQ ID NO: 399), a CFH gene (see e.g., NCBI Gene ID: 3075; SEQ ID NO: 400), a CRB1 gene (see e.g., NCBI Gene ID: 23418; SEQ ID NO: 401), a ADIPOR1 gene (see e.g., NCBI Gene ID: 51094; SEQ ID NO: 402), a RD3 gene (see e.g., NCBI Gene ID: 343035; SEQ ID NO: 403), a NEK2 gene (see e.g., NCBI Gene ID: 4751; SEQ ID NO: 404), a FLVCR1 gene (see e.g., NCBI Gene ID: 28982; SEQ ID NO: 405), a USH2A gene (see e.g., NCBI Gene ID: 7399; SEQ ID NO: 406), a SDCCAG8 gene (see e.g., NCBI Gene ID: 10806; SEQ ID NO: 407), a OR2W3 gene (see e.g., NCBI Gene ID: 343171; SEQ ID NO: 408), a NBAS gene (see e.g., NCBI Gene ID: 51594; SEQ ID NO: 409), a AGBL5 gene (see e.g., NCBI Gene ID: 60509; SEQ ID NO: 410), a ZNF513 gene (see e.g., NCBI Gene ID: 130557; SEQ ID NO: 411), a IFT172 gene (see e.g., NCBI Gene ID: 26160; SEQ ID NO: 412), a PCARE gene (see e.g., NCBI Gene ID: 388939; SEQ ID NO: 413), a EFEMP1/TLE5 gene (see e.g., NCBI Gene ID: 2202; SEQ ID NO: 414), a FAM161A gene (see e.g., NCBI Gene ID: 84140; SEQ ID NO: 415), a WDPCP gene (see e.g., NCBI Gene ID: 51057; SEQ ID NO: 416), a ALMS1 gene (see e.g., NCBI Gene ID: 7840; SEQ ID NO: 417), a SNRNP200 gene (see e.g., NCBI Gene ID: 23020; SEQ ID NO: 418), a CNNM4 gene (see e.g., NCBI Gene ID: 26504; SEQ ID NO: 419), a CNGA3 gene (see e.g., NCBI Gene ID: 1261; SEQ ID NO: 420), a NPHP1 gene (see e.g., NCBI Gene ID: 4867; SEQ ID NO: 421), a MERTK gene (see e.g., NCBI Gene ID: 10461; SEQ ID NO: 422), a BBS5 gene (see e.g., NCBI Gene ID: 129880; SEQ ID NO: 423), a CERKL gene (see e.g., NCBI Gene ID: 375298; SEQ ID NO: 424), a NEUROD1 gene (see e.g., NCBI Gene ID: 4760; SEQ ID NO: 425), a TMEM237 gene (see e.g., NCBI Gene ID: 65062; SEQ ID NO: 426), a KCNJ13 gene (see e.g., NCBI Gene ID: 3769; SEQ ID NO: 427), a SAG gene (see e.g., NCBI Gene ID: 6295; SEQ ID NO: 428), a SPP2 gene (see e.g., NCBI Gene ID: 6694; SEQ ID NO: 429), a TRNT1 gene (see e.g., NCBI Gene ID: 51095; SEQ ID NO: 430), a SLC4A7 gene (see e.g., NCBI Gene ID: 9497; SEQ ID NO: 431), a LZTFL1 gene (see e.g., NCBI Gene ID: 54585; SEQ ID NO: 432), a GNAT1 gene (see e.g., NCBI Gene ID: 2779; SEQ ID NO: 433), a TREX1 gene (see e.g., NCBI Gene ID: 11277; SEQ ID NO: 434), a MAPKAPK3 gene (see e.g., NCBI Gene ID: 7867; SEQ ID NO: 435), a ATXN7 gene (see e.g., NCBI Gene ID: 6314; SEQ ID NO: 436), a PROS1 gene (see e.g., NCBI Gene ID: 5627; SEQ ID NO: 437), a ARL6 gene (see e.g., NCBI Gene ID: 84100; SEQ ID NO: 438), a IMPG2 gene (see e.g., NCBI Gene ID: 50939; SEQ ID NO: 439), a IQCB1 gene (see e.g., NCBI Gene ID: 9657; SEQ ID NO: 440), a RHO gene (see e.g., NCBI Gene ID: 6010; SEQ ID NO: 441), a NPHP3 gene (see e.g., NCBI Gene ID: 27031; SEQ ID NO: 442), a CLRN1 gene (see e.g., NCBI Gene ID: 7401; SEQ ID NO: 443), a SLC7A14 gene (see e.g., NCBI Gene ID: 57709; SEQ ID NO: 444), a PCYT1A gene (see e.g., NCBI Gene ID: 5130; SEQ ID NO: 445), a CEP19 gene (see e.g., NCBI Gene ID: 84984; SEQ ID NO: 446), a PDE6B gene (see e.g., NCBI Gene ID: 5158; SEQ ID NO: 447), a WFS1 gene (see e.g., NCBI Gene ID: 7466; SEQ ID NO: 448), a HMX1 gene (see e.g., NCBI Gene ID: 3166; SEQ ID NO: 449), a RAB28 gene (see e.g., NCBI Gene ID: 9364; SEQ ID NO: 450), a CC2D2A gene (see e.g., NCBI Gene ID: 57545; SEQ ID NO: 451), a PROM1 gene (see e.g., NCBI Gene ID: 8842; SEQ ID NO: 452), a ADGRA3 gene (see e.g., NCBI Gene ID: 166647; SEQ ID NO: 453), a DTHD1 gene (see e.g., NCBI Gene ID: 401124; SEQ ID NO: 454), a WDR19 gene (see e.g., NCBI Gene ID: 57728; SEQ ID NO: 455), a CNGA1 gene (see e.g., NCBI Gene ID: 1259; SEQ ID NO: 456), a CISD2 gene (see e.g., NCBI Gene ID: 493856; SEQ ID NO: 457), a MTTP gene (see e.g., NCBI Gene ID: 4547; SEQ ID NO: 458), a LRIT3 gene (see e.g., NCBI Gene ID: 345193; SEQ ID NO: 459), a BBS7 gene (see e.g., NCBI Gene ID: 55212; SEQ ID NO: 460), a BBS12 gene (see e.g., NCBI Gene ID: 166379; SEQ ID NO: 461), a MFSD8 gene (see e.g., NCBI Gene ID: 256471; SEQ ID NO: 462), a PLK4 gene (see e.g., NCBI Gene ID: 10733; SEQ ID NO: 463), a LRAT gene (see e.g., NCBI Gene ID: 9227; SEQ ID NO: 464), a TLR3 gene (see e.g., NCBI Gene ID: 7098; SEQ ID NO: 465), a CYP4V2 gene (see e.g., NCBI Gene ID: 285440; SEQ ID NO: 466), a CWC27 gene (see e.g., NCBI Gene ID: 10283; SEQ ID NO: 467), a POC5 gene (see e.g., NCBI Gene ID: 134359; SEQ ID NO: 468), a VCAN gene (see e.g., NCBI Gene ID: 1462; SEQ ID NO: 469), a ADGRV1 gene (see e.g., NCBI Gene ID: 84059; SEQ ID NO: 470), a NR2F1 gene (see e.g., NCBI Gene ID: 7025; SEQ ID NO: 471), a SLC25A46 gene (see e.g., NCBI Gene ID: 91137; SEQ ID NO: 472), a CTNNA1 gene (see e.g., NCBI Gene ID: 1495; SEQ ID NO: 473), a HARS1 gene (see e.g., NCBI Gene ID: 3035; SEQ ID NO: 474), a PDE6A gene (see e.g., NCBI Gene ID: 5145; SEQ ID NO: 475), a GRM6 gene (see e.g., NCBI Gene ID: 2916; SEQ ID NO: 476), a MAK gene (see e.g., NCBI Gene ID: 4117; SEQ ID NO: 477), a C2 gene (see e.g., NCBI Gene ID: 717; SEQ ID NO: 478), a CFB gene (see e.g., NCBI Gene ID: 629; SEQ ID NO: 479), a TULP1 gene (see e.g., NCBI Gene ID: 7287; SEQ ID NO: 480), a GUCA1A gene (see e.g., NCBI Gene ID: 2978; SEQ ID NO: 481), a GUCA1B gene (see e.g., NCBI Gene ID: 2979; SEQ ID NO: 482), a PRPH2 gene (see e.g., NCBI Gene ID: 5961; SEQ ID NO: 483), a IMPG1 gene (see e.g., NCBI Gene ID: 3617; SEQ ID NO: 484), a EYS gene (see e.g., NCBI Gene ID: 346007; SEQ ID NO: 485), a COL9A1 gene (see e.g., NCBI Gene ID: 1297; SEQ ID NO: 486), a RIMS1 gene (see e.g., NCBI Gene ID: 22999; SEQ ID NO: 487), a LCA5 gene (see e.g., NCBI Gene ID: 167691; SEQ ID NO: 488), a ELOVL4 gene (see e.g., NCBI Gene ID: 6785; SEQ ID NO: 489), a PRDM13 gene (see e.g., NCBI Gene ID: 59336; SEQ ID NO: 490), a RTN4IP1 gene (see e.g., NCBI Gene ID: 84816; SEQ ID NO: 491), a AHI1 gene (see e.g., NCBI Gene ID: 54806; SEQ ID NO: 492), a PEX7 gene (see e.g., NCBI Gene ID: 5191; SEQ ID NO: 493), a CNOT9 gene (see e.g., NCBI Gene ID: 9125; SEQ ID NO: 494), a AHR gene (see e.g., NCBI Gene ID: 196; SEQ ID NO: 495), a KLHL7 gene (see e.g., NCBI Gene ID: 55975; SEQ ID NO: 496), a RP9 gene (see e.g., NCBI Gene ID: 6100; SEQ ID NO: 497), a BBS9 gene (see e.g., NCBI Gene ID: 27241; SEQ ID NO: 498), a PEX1 gene (see e.g., NCBI Gene ID: 5189; SEQ ID NO: 499), a TSPAN12 gene (see e.g., NCBI Gene ID: 23554; SEQ ID NO: 500), a IMPDH1 gene (see e.g., NCBI Gene ID: 3614; SEQ ID NO: 501), a OPN1SW gene (see e.g., NCBI Gene ID: 611; SEQ ID NO: 502), a KIAA1549 gene (see e.g., NCBI Gene ID: 57670; SEQ ID NO: 503), a RP1L1 gene (see e.g., NCBI Gene ID: 94137; SEQ ID NO: 504), a ADAM9 gene (see e.g., NCBI Gene ID: 8754; SEQ ID NO: 505), a HGSNAT gene (see e.g., NCBI Gene ID: 138050; SEQ ID NO: 506), a RP1 gene (see e.g., NCBI Gene ID: 6101; SEQ ID NO: 507), a TTPA gene (see e.g., NCBI Gene ID: 7274; SEQ ID NO: 508), a CSPP1 gene (see e.g., NCBI Gene ID: 79848; SEQ ID NO: 509), a OPA1 gene (see e.g., NCBI Gene ID: 4976; SEQ ID NO: 510), a PEX2 gene (see e.g., NCBI Gene ID: 5828; SEQ ID NO: 511), a CNGB3 gene (see e.g., NCBI Gene ID: 54714; SEQ ID NO: 512), a CFAP418 gene (see e.g., NCBI Gene ID: 157657; SEQ ID NO: 513), a GDF6 gene (see e.g., NCBI Gene ID: 392255; SEQ ID NO: 514), a RIMS2 gene (see e.g., NCBI Gene ID: 9699; SEQ ID NO: 515), a KCNV2 gene (see e.g., NCBI Gene ID: 169522; SEQ ID NO: 516), a TOPORS gene (see e.g., NCBI Gene ID: 10210; SEQ ID NO: 517), a CEP78 gene (see e.g., NCBI Gene ID: 84131; SEQ ID NO: 518), a INVS gene (see e.g., NCBI Gene ID: 27130; SEQ ID NO: 519), a PRPF4 gene (see e.g., NCBI Gene ID: 9128; SEQ ID NO: 520), a WHRN gene (see e.g., NCBI Gene ID: 25861; SEQ ID NO: 521), a TRIM32 gene (see e.g., NCBI Gene ID: 22954; SEQ ID NO: 522), a TLR4 gene (see e.g., NCBI Gene ID: 7099; SEQ ID NO: 523), a DYNC212 gene (see e.g., NCBI Gene ID: 89891; SEQ ID NO: 524), a PDCD2 gene (see e.g., NCBI Gene ID: 5134; SEQ ID NO: 525), a EXOSC2 gene (see e.g., NCBI Gene ID: 23404; SEQ ID NO: 526), a INPP5E gene (see e.g., NCBI Gene ID: 56623; SEQ ID NO: 527), a PHYH gene (see e.g., NCBI Gene ID: 5264; SEQ ID NO: 528), a ACBD5 gene (see e.g., NCBI Gene ID: 91452; SEQ ID NO: 529), a PCDH15 gene (see e.g., NCBI Gene ID: 65217; SEQ ID NO: 530), a RBP3 gene (see e.g., NCBI Gene ID: 5949; SEQ ID NO: 531), a ERCC6 gene (see e.g., NCBI Gene ID: 2074; SEQ ID NO: 532), a HK1 gene (see e.g., NCBI Gene ID: 3098; SEQ ID NO: 533), a CDH23 gene (see e.g., NCBI Gene ID: 64072; SEQ ID NO: 534), a CDHR1 gene (see e.g., NCBI Gene ID: 92211; SEQ ID NO: 535), a RGR gene (see e.g., NCBI Gene ID: 5995; SEQ ID NO: 536), a KIF11 gene (see e.g., NCBI Gene ID: 3832; SEQ ID NO: 537), a RBP4 gene (see e.g., NCBI Gene ID: 5950; SEQ ID NO: 538), a PDE6C gene (see e.g., NCBI Gene ID: 5146; SEQ ID NO: 539), a PAX2 gene (see e.g., NCBI Gene ID: 5076; SEQ ID NO: 540), a PDZD7 gene (see e.g., NCBI Gene ID: 79955; SEQ ID NO: 541), a ARL3 gene (see e.g., NCBI Gene ID: 403; SEQ ID NO: 542), a BBIP1 gene (see e.g., NCBI Gene ID: 92482; SEQ ID NO: 543), a ARMS2 gene (see e.g., NCBI Gene ID: 387715; SEQ ID NO: 544), a HTRA1 gene (see e.g., NCBI Gene ID: 5654; SEQ ID NO: 545), a OAT gene (see e.g., NCBI Gene ID: 4942; SEQ ID NO: 546), a ZNF408 gene (see e.g., NCBI Gene ID: 79797; SEQ ID NO: 547), a TUB gene (see e.g., NCBI Gene ID: 7275; SEQ ID NO: 548), a TEAD1 gene (see e.g., NCBI Gene ID: 7003; SEQ ID NO: 549), a USH1C gene (see e.g., NCBI Gene ID: 10083; SEQ ID NO: 550), a TMEM216 gene (see e.g., NCBI Gene ID: 51259; SEQ ID NO: 551), a BEST1 gene (see e.g., NCBI Gene ID: 7439; SEQ ID NO: 552), a ASRGL1 gene (see e.g., NCBI Gene ID: 80150; SEQ ID NO: 553), a ROM1 gene (see e.g., NCBI Gene ID: 6094; SEQ ID NO: 554), a BBS1 gene (see e.g., NCBI Gene ID: 582; SEQ ID NO: 555), a CABP4 gene (see e.g., NCBI Gene ID: 57010; SEQ ID NO: 556), a LRP5 gene (see e.g., NCBI Gene ID: 4041; SEQ ID NO: 557), a CAPN5 gene (see e.g., NCBI Gene ID: 726; SEQ ID NO: 558), a MYO7A gene (see e.g., NCBI Gene ID: 4647; SEQ ID NO: 559), a TMEM126A gene (see e.g., NCBI Gene ID: 84233; SEQ ID NO: 560), a FZD4 gene (see e.g., NCBI Gene ID: 8322; SEQ ID NO: 561), a DYNC2LI1 gene (see e.g., NCBI Gene ID: 51626; SEQ ID NO: 562), a CEP164 gene (see e.g., NCBI Gene ID: 22897; SEQ ID NO: 563), a C1QTNF5 gene (see e.g., NCBI Gene ID: 114902; SEQ ID NO: 564), a MFRP gene (see e.g., NCBI Gene ID: 83552; SEQ ID NO: 565), a CACNA2D4 gene (see e.g., NCBI Gene ID: 93589; SEQ ID NO: 566), a GNB3 gene (see e.g., NCBI Gene ID: 2784; SEQ ID NO: 567), a PDE6H gene (see e.g., NCBI Gene ID: 5149; SEQ ID NO: 568), a COL2A1 gene (see e.g., NCBI Gene ID: 1280; SEQ ID NO: 569), a MMP19 gene (see e.g., NCBI Gene ID: 4327; SEQ ID NO: 570), a RDH5 gene (see e.g., NCBI Gene ID: 5959; SEQ ID NO: 571), a CCT2 gene (see e.g., NCBI Gene ID: 10576; SEQ ID NO: 572), a BBS10 gene (see e.g., NCBI Gene ID: 79738; SEQ ID NO: 573), a CEP290 gene (see e.g., NCBI Gene ID: 80184; SEQ ID NO: 574), a POC1B gene (see e.g., NCBI Gene ID: 282809; SEQ ID NO: 575), a MVK gene (see e.g., NCBI Gene ID: 4598; SEQ ID NO: 576), a IFT81 gene (see e.g., NCBI Gene ID: 28981; SEQ ID NO: 577), a MTRFR gene (see e.g., NCBI Gene ID: 91574; SEQ ID NO: 578), a ITM2B gene (see e.g., NCBI Gene ID: 9445; SEQ ID NO: 579), a RB1 gene (see e.g., NCBI Gene ID: 5925; SEQ ID NO: 580), a RCBTB1 gene (see e.g., NCBI Gene ID: 55213; SEQ ID NO: 581), a GRK1 gene (see e.g., NCBI Gene ID: 6011; SEQ ID NO: 582), a RPGRIP1 gene (see e.g., NCBI Gene ID: 57096; SEQ ID NO: 583), a NRL gene (see e.g., NCBI Gene ID: 4901; SEQ ID NO: 584), a OTX2 gene (see e.g., NCBI Gene ID: 5015; SEQ ID NO: 585), a RDH11 gene (see e.g., NCBI Gene ID: 51109; SEQ ID NO: 585), a RDH12 gene (see e.g., NCBI Gene ID: 145226; SEQ ID NO: 587), a TTLL5 gene (see e.g., NCBI Gene ID: 23093; SEQ ID NO: 588), a SPATA7 gene (see e.g., NCBI Gene ID: 55812; SEQ ID NO: 589), a TTC8 gene (see e.g., NCBI Gene ID: 123016; SEQ ID NO: 590), a FBLN5 gene (see e.g., NCBI Gene ID: 10516; SEQ ID NO: 591), a TRPM1 gene (see e.g., NCBI Gene ID: 4308; SEQ ID NO: 592), a TUBGCP4 gene (see e.g., NCBI Gene ID: 27229; SEQ ID NO: 593), a SLC24A1 gene (see e.g., NCBI Gene ID: 9187; SEQ ID NO: 594), a NR2E3 gene (see e.g., NCBI Gene ID: 10002; SEQ ID NO: 595), a BBS4 gene (see e.g., NCBI Gene ID: 585; SEQ ID NO: 596), a CIB2 gene (see e.g., NCBI Gene ID: 10518; SEQ ID NO: 597), a RLBP1 gene (see e.g., NCBI Gene ID: 6017; SEQ ID NO: 598), a GNPTG gene (see e.g., NCBI Gene ID: 84572; SEQ ID NO: 599), a IFT140 gene (see e.g., NCBI Gene ID: 9742; SEQ ID NO: 600), a CLUAP1 gene (see e.g., NCBI Gene ID: 23059; SEQ ID NO: 601), a ABCC6 gene (see e.g., NCBI Gene ID: 368; SEQ ID NO: 602), a CRYM gene (see e.g., NCBI Gene ID: 1428; SEQ ID NO: 603), a CLN3 gene (see e.g., NCBI Gene ID: 1201; SEQ ID NO: 604), a ZNF423 gene (see e.g., NCBI Gene ID: 23090; SEQ ID NO: 605), a RPGRIP1L gene (see e.g., NCBI Gene ID: 23322; SEQ ID NO: 606), a BBS2 gene (see e.g., NCBI Gene ID: 583; SEQ ID NO: 607), a ARL2BP gene (see e.g., NCBI Gene ID: 23568; SEQ ID NO: 608), a CNGB1 gene (see e.g., NCBI Gene ID: 1258; SEQ ID NO: 609), a CDH3 gene (see e.g., NCBI Gene ID: 1001; SEQ ID NO: 610), a DHX38 gene (see e.g., NCBI Gene ID: 9785; SEQ ID NO: 611), a ADAMTS18 gene (see e.g., NCBI Gene ID: 170692; SEQ ID NO: 612), a SLC38A8 gene (see e.g., NCBI Gene ID: 146167; SEQ ID NO: 613), a GUCY2D gene (see e.g., NCBI Gene ID: 3000; SEQ ID NO: 614), a PRPF8 gene (see e.g., NCBI Gene ID: 10594; SEQ ID NO: 615), a AIPL1 gene (see e.g., NCBI Gene ID: 23746; SEQ ID NO: 616), a PITPNM3 gene (see e.g., NCBI Gene ID: 83394; SEQ ID NO: 617), a UNC119 gene (see e.g., NCBI Gene ID: 9094; SEQ ID NO: 618), a GPR179 gene (see e.g., NCBI Gene ID: 440435; SEQ ID NO: 619), a MKS1 gene (see e.g., NCBI Gene ID: 54903; SEQ ID NO: 620), a CA4 gene (see e.g., NCBI Gene ID: 762; SEQ ID NO: 621), a RGS9 gene (see e.g., NCBI Gene ID: 8787; SEQ ID NO: 622), a ARSG gene (see e.g., NCBI Gene ID: 22901; SEQ ID NO: 623), a USH1G gene (see e.g., NCBI Gene ID: 124590; SEQ ID NO: 624), a PRCD gene (see e.g., NCBI Gene ID: 768206; SEQ ID NO: 625), a FSCN2 gene (see e.g., NCBI Gene ID: 25794; SEQ ID NO: 626), a PDE6G gene (see e.g., NCBI Gene ID: 5148; SEQ ID NO: 627), a LAMA1 gene (see e.g., NCBI Gene ID: 284217; SEQ ID NO: 628), a AFG3L2 gene (see e.g., NCBI Gene ID: 10939; SEQ ID NO: 629), a CRX gene (see e.g., NCBI Gene ID: 1406; SEQ ID NO: 630), a REEP6 gene (see e.g., NCBI Gene ID: 92840; SEQ ID NO: 631), a RAX2 gene (see e.g., NCBI Gene ID: 84839; SEQ ID NO: 632), a C3 gene (see e.g., NCBI Gene ID: 718; SEQ ID NO: 633), a ARHGEF18 gene (see e.g., NCBI Gene ID: 23370; SEQ ID NO: 634), a PNPLA6 gene (see e.g., NCBI Gene ID: 10908; SEQ ID NO: 635), a RGS9BP gene (see e.g., NCBI Gene ID: 388531; SEQ ID NO: 636), a OPA3 gene (see e.g., NCBI Gene ID: 80207; SEQ ID NO: 637), a PRPF31 gene (see e.g., NCBI Gene ID: 26121; SEQ ID NO: 638), a IDH3B gene (see e.g., NCBI Gene ID: 3420; SEQ ID NO: 639), a PANK2 gene (see e.g., NCBI Gene ID: 80025; SEQ ID NO: 640), a JAG1 gene (see e.g., NCBI Gene ID: 182; SEQ ID NO: 641), a MKKS gene (see e.g., NCBI Gene ID: 8195; SEQ ID NO: 642), a KIZ gene (see e.g., NCBI Gene ID: 55857; SEQ ID NO: 643), a ABHD12 gene (see e.g., NCBI Gene ID: 26090; SEQ ID NO: 644), a KIF3B gene (see e.g., NCBI Gene ID: 9371; SEQ ID NO: 645), a CEP250 gene (see e.g., NCBI Gene ID: 11190; SEQ ID NO: 646), a PRPF6 gene (see e.g., NCBI Gene ID: 24148; SEQ ID NO: 647), a CFAP410 gene (see e.g., NCBI Gene ID: 755; SEQ ID NO: 648), a DNM1L gene (see e.g., NCBI Gene ID: 10059; SEQ ID NO: 649), a TIMP3 gene (see e.g., NCBI Gene ID: 7078; SEQ ID NO: 650), a IFT27 gene (see e.g., NCBI Gene ID: 11020; SEQ ID NO: 651), a FBLN1 gene (see e.g., NCBI Gene ID: 2192; SEQ ID NO: 652), a MIEF1 gene (see e.g., NCBI Gene ID; SEQ ID NO: 653), a ACO2 gene (see e.g., NCBI Gene ID: 50; SEQ ID NO: 654), a TUBGCP6 gene (see e.g., NCBI Gene ID: 85378; SEQ ID NO: 655), a OFD1 gene (see e.g., NCBI Gene ID: 8481; SEQ ID NO: 656), a RS1 gene (see e.g., NCBI Gene ID: 6247; SEQ ID NO: 657), a RP2 gene (see e.g., NCBI Gene ID: 6102; SEQ ID NO: 658), a DMD gene (see e.g., NCBI Gene ID: 1756; SEQ ID NO: 659), a RPGR gene (see e.g., NCBI Gene ID: 6103; SEQ ID NO: 660), a NYX gene (see e.g., NCBI Gene ID: 60506; SEQ ID NO: 661), a PEPD gene (see e.g., NCBI Gene ID: 5184; SEQ ID NO: 662), a NDP gene (see e.g., NCBI Gene ID: 4693; SEQ ID NO: 663), a CACNA1F gene (see e.g., NCBI Gene ID: 778; SEQ ID NO: 664), a PGK1 gene (see e.g., NCBI Gene ID: 5230; SEQ ID NO: 665), a CHM gene (see e.g., NCBI Gene ID: 1121; SEQ ID NO: 666), a TIMM8A gene (see e.g., NCBI Gene ID: 1678; SEQ ID NO: 667), a PRPS1 gene (see e.g., NCBI Gene ID: 5631; SEQ ID NO: 668), a OPN1LW gene (see e.g., NCBI Gene ID: 5956; SEQ ID NO: 669), a OPN1MW gene (see e.g., NCBI Gene ID: 2652; SEQ ID NO: 670), a OPN1SW gene (see e.g., NCBI Gene ID: 611; SEQ ID NO: 671), a TFAM gene (see e.g., NCBI Gene ID: 7019; SEQ ID NO: 672), a MT-ND1 gene (see e.g., NCBI Gene ID: 4535; SEQ ID NO: 673), a MT-ND2 gene (see e.g., NCBI Gene ID: 4536; SEQ ID NO: 674), a MT-ND3 gene (see e.g., NCBI Gene ID: 4537; SEQ ID NO: 675), a MT-ND4L gene (see e.g., NCBI Gene ID: 4539; SEQ ID NO: 676), a MT-ND4 gene (see e.g., NCBI Gene ID: 4538; SEQ ID NO: 677), a MT-ND5 gene (see e.g., NCBI Gene ID: 4540; SEQ ID NO: 678), a MT-ND6 gene (see e.g., NCBI Gene ID: 4541; SEQ ID NO: 679), a MT-ATP6 gene (see e.g., NCBI Gene ID: 4508; SEQ ID NO: 680), a MT-ATP8 gene (see e.g., NCBI Gene ID: 4509; SEQ ID NO: 681), a MT-CO1 gene (see e.g., NCBI Gene ID: 4512; SEQ ID NO: 682), a MT-CO3 gene (see e.g., NCBI Gene ID: 4514; SEQ ID NO: 683), a MT-CYB gene (see e.g., NCBI Gene ID: 4519; SEQ ID NO: 684), a LARS2 gene (see e.g., NCBI Gene ID: 23395; SEQ ID NO: 685), a EARS2 gene (see e.g., NCBI Gene ID: 124454; SEQ ID NO: 686), a KARS1 gene (see e.g., NCBI Gene ID: 3735; SEQ ID NO: 687), a HARS2 gene (see e.g., NCBI Gene ID: 23438; SEQ ID NO: 688), a SARS2 gene (see e.g., NCBI Gene ID: 54938; SEQ ID NO: 689), a PARS2 gene (see e.g., NCBI Gene ID: 25973; SEQ ID NO: 690), a MMACHC gene (see e.g., NCBI Gene ID: 25974; SEQ ID NO: 691), a POU3F4 gene (see e.g., NCBI Gene ID: 5456; SEQ ID NO: 692), a RPS6KA6 gene (see e.g., NCBI Gene ID: 27330; SEQ ID NO: 693), a CPLANE1 gene (see e.g., NCBI Gene ID: 65250; SEQ ID NO: 694), a TMEM67 gene (see e.g., NCBI Gene ID: 91147; SEQ ID NO: 695), a TRAF3IP1 gene (see e.g., NCBI Gene ID: 26146; SEQ ID NO: 696), a IFT74 gene (see e.g., NCBI Gene ID: 80173; SEQ ID NO: 697), a SCAPER gene (see e.g., NCBI Gene ID: 49855; SEQ ID NO: 698), a SCLT1 gene (see e.g., NCBI Gene ID: 132320; SEQ ID NO: 699), a KIAA0586 gene (see e.g., NCBI Gene ID: 9786; SEQ ID NO: 700), a TCTN2 gene (see e.g., NCBI Gene ID: 79867; SEQ ID NO: 701), a ARL13B gene (see e.g., NCBI Gene ID: 200894; SEQ ID NO: 702), a B9D1 gene (see e.g., NCBI Gene ID: 27077; SEQ ID NO: 703), a B9D2 gene (see e.g., NCBI Gene ID: 80776; SEQ ID NO: 704), a C2CD3 gene (see e.g., NCBI Gene ID: 26005; SEQ ID NO: 705), a CEP41 gene (see e.g., NCBI Gene ID: 95681; SEQ ID NO: 706), a CEP104 gene (see e.g., NCBI Gene ID: 9731; SEQ ID NO: 707), a CEP120 gene (see e.g., NCBI Gene ID: 153241; SEQ ID NO: 708), a IFT172 gene (see e.g., NCBI Gene ID: 26160; SEQ ID NO: 709), a KATNIP gene (see e.g., NCBI Gene ID: 23247; SEQ ID NO: 710), a KIF7 gene (see e.g., NCBI Gene ID: 374654; SEQ ID NO: 711), a PDE6D gene (see e.g., NCBI Gene ID: 5147; SEQ ID NO: 712), a TCTN1 gene (see e.g., NCBI Gene ID: 79600; SEQ ID NO: 713), a TCTN3 gene (see e.g., NCBI Gene ID: 26123; SEQ ID NO: 714), a TMEM107 gene (see e.g., NCBI Gene ID: 84314; SEQ ID NO: 715), a TMEM138 gene (see e.g., NCBI Gene ID: 51524; SEQ ID NO: 716), a TMEM231 gene (see e.g., NCBI Gene ID: 79583; SEQ ID NO: 717), a TTC21B gene (see e.g., NCBI Gene ID: 79809; SEQ ID NO: 718), a RORA gene (see e.g., NCBI Gene ID: 6095; SEQ ID NO: 719), a NGF gene (see e.g., NCBI Gene ID: 4803; SEQ ID NO: 720), a COL8A2 gene (see e.g., NCBI Gene ID: 1296; SEQ ID NO: 721), a SLC4A11 gene (see e.g., NCBI Gene ID: 83959; SEQ ID NO: 722), a ZEB1 gene (see e.g., NCBI Gene ID: 6935; SEQ ID NO: 723), a KRT83 gene (see e.g., NCBI Gene ID: 3889; SEQ ID NO: 724), a KRT12 gene (see e.g., NCBI Gene ID: 3859; SEQ ID NO: 725), a TGFBI gene (see e.g., NCBI Gene ID: 7045; SEQ ID NO: 726), a TACSTD2 gene (see e.g., NCBI Gene ID: 4070; SEQ ID NO: 727), a CHST6 gene (see e.g., NCBI Gene ID: 4166; SEQ ID NO: 728), a GSN gene (see e.g., NCBI Gene ID: 2934; SEQ ID NO: 729), a UBIAD1 gene (see e.g., NCBI Gene ID: 29914; SEQ ID NO: 730), a DCN gene (see e.g., NCBI Gene ID: 1634; SEQ ID NO: 731), a PIKFYVE gene (see e.g., NCBI Gene ID: 200576; SEQ ID NO: 732), a OVOL2 gene (see e.g., NCBI Gene ID: 58495; SEQ ID NO: 733), a GRHL2 gene (see e.g., NCBI Gene ID: 79977; SEQ ID NO: 734), etc. In some embodiments, a polynucleotide of the present disclosure comprises a sequence having at least 75%, at least 80%, at least 85%, at least 86%, at least 87%, at least 88%, at least 89%, at least 90%, at least 91%, at least 92%, at least 93%, at least 94%, at least 95%, at least 96%, at least 97%, at least 98%, at least 99%, or 100% sequence identity to the sequence of any of the human genes (and/or coding sequences thereof) described herein or known in the art.

[0075] In some embodiments, a polynucleotide of the present disclosure encodes a beta-nerve growth factor polypeptide. In some embodiments, the beta-nerve growth factor polypeptide is a human beta-nerve growth factor polypeptide (see e.g., UniProt accession number: P01138). In some embodiments, the polynucleotide comprises the coding sequence of a wild-type NGF gene (see e.g., NCBI Gene ID: 4803, SEQ ID NO: 720), or a codon-optimized variant thereof (see e.g., SEQ ID NO: 735 SEQ ID NO. 736, SEQ ID NO: 741, SEQ ID NO: 742, and/or SEQ ID NO: 743). In some embodiments, a polynucleotide encoding a beta-nerve growth factor polypeptide is a polynucleotide that encodes a polypeptide comprising an amino acid sequence having at least 75%, at least 80%, at least 85%, at least 86%, at least 87%, at least 88%, at least 89%, at least 90%, at least 91%, at least 92%, at least 93%, at least 94%, at least 95%, at least 96%, at least 97%, at least 98%, at least 99%, or 100% identity to the sequence of SEQ ID NO: 363. In some embodiments, a polynucleotide encoding a beta-nerve growth factor polypeptide is a polynucleotide that encodes a polypeptide comprising the amino acid sequence of SEQ ID NO: 363.

[0076] In some embodiments, a polynucleotide of the present disclosure encodes a beta-nerve growth factor polypeptide. In some embodiments, the beta-nerve growth factor polypeptide is a human beta-nerve growth factor polypeptide (see e.g., UniProt accession number: P01138). In some embodiments, the polynucleotide comprises the coding sequence of a wild-type NGF gene (see e.g., NCBI Gene ID: 4803, SEQ ID NO: 720), or a codon-optimized variant thereof (see e.g., SEQ ID NO: 735, SEQ ID NO. 736, SEQ ID NO: 741, SEQ ID NO: 742, and/or SEQ ID NO: 743). In some embodiments, a polynucleotide encoding a beta-nerve growth factor polypeptide is a polynucleotide that encodes a polypeptide comprising an amino acid sequence having at least 75%, at least 80%, at least 85%, at least 86%, at least 87%, at least 88%, at least 89%, at least 90%, at least 91%, at least 92%, at least 93%, at least 94%, at least 95%, at least 96%, at least 97%, at least 98%, at least 99%, or 100% identity to the sequence of SEQ ID NO: 739. In some embodiments, a polynucleotide encoding a beta-nerve growth factor polypeptide is a polynucleotide that encodes a polypeptide comprising the amino acid sequence of SEQ ID NO: 739.

[0077] In some embodiments, a polynucleotide of the present disclosure encodes a beta-nerve growth factor polypeptide. In some embodiments, the beta-nerve growth factor polypeptide is a human beta-nerve growth factor polypeptide (see e.g., UniProt accession number: P01138). In some embodiments, the polynucleotide comprises the coding sequence of a wild-type NGF gene (see e.g., NCBI Gene ID: 4803, SEQ ID NO: 720), or a codon-optimized variant thereof (see e.g., SEQ ID NO: 735, SEQ ID NO. 736, SEQ ID NO: 741, SEQ ID NO: 742, and/or SEQ ID NO: 743). In some embodiments, a polynucleotide encoding a beta-nerve growth factor polypeptide is a polynucleotide that encodes a polypeptide comprising an amino acid sequence having at least 75%, at least 80%, at least 85%, at least 86%, at least 87%, at least 88%, at least 89%, at least 90%, at least 91%, at least 92%, at least 93%, at least 94%, at least 95%, at least 96%, at least 97%, at least 98%, at least 99%, or 100% identity to the sequence of SEQ ID NO: 740. In some embodiments, a polynucleotide encoding a beta-nerve growth factor polypeptide is a polynucleotide that encodes a polypeptide comprising the amino acid sequence of SEQ ID NO: 740.

[0078] In some embodiments, a polynucleotide encoding a beta-nerve growth factor polypeptide is a polynucleotide that encodes an N-terminal truncation, a C-terminal truncation, or a fragment of the amino acid sequence of SEQ ID NO: 363, SEQ ID NO: 739, and/or SEQ ID NO: 740. N-terminal truncations, C-terminal truncations, or fragments may comprise at least 10, at least 12, at least 14, at least 16, at least 18, at least 20, at least 30, at least 40, at least 50, at least 75, at least 100, at least 200, but fewer than 241, consecutive amino acids of SEQ ID NO: 363, SEQ ID NO: 739, and/or SEQ ID NO: 740.

[0079] In some embodiments, a polynucleotide of the present disclosure encodes a retinal-specific phospholipid-transporting ATPase polypeptide. In some embodiments, the retinal-specific phospholipid-transporting ATPase polypeptide is a human retinal-specific phospholipid-transporting ATPase polypeptide (see e.g., UniProt accession number: P78363). In some embodiments, the polynucleotide comprises the coding sequence of a wild-type ABCA4 gene (see e.g., NCBI Gene ID: 24, SEQ ID NO: 390), or a codon-optimized variant thereof (see e.g., SEQ ID NO: 737). In some embodiments, a polynucleotide encoding a retinal-specific phospholipid-transporting ATPase polypeptide is a polynucleotide that encodes a polypeptide comprising an amino acid sequence having at least 75%, at least 80%, at least 85%, at least 86%, at least 87%, at least 88%, at least 89%, at least 90%, at least 91%, at least 92%, at least 93%, at least 94%, at least 95%, at least 96%, at least 97%, at least 98%, at least 99%, or 100% identity to the sequence of SEQ ID NO: 33. In some embodiments, a polynucleotide encoding a retinal-specific phospholipid-transporting ATPase polypeptide is a polynucleotide that encodes a polypeptide comprising the amino acid sequence of SEQ ID NO: 33.

[0080] In some embodiments, a polynucleotide encoding a retinal-specific phospholipid-transporting ATPase polypeptide is a polynucleotide that encodes an N-terminal truncation, a C-terminal truncation, or a fragment of the amino acid sequence of SEQ ID NO: 33. N-terminal truncations, C-terminal truncations, or fragments may comprise at least 10, at least 12, at least 14, at least 16, at least 18, at least 20, at least 30, at least 40, at least 50, at least 75, at least 100, at least 200, at least 300, at least 400, at least 500, at least 600, at least 700, at least 800, at least 900, at least 1,000, but fewer than 2,273, consecutive amino acids of SEQ ID NO: 33.

[0081] In some embodiments, a polynucleotide of the present disclosure encodes a centrosomal protein of 290 kDa polypeptide. In some embodiments, the centrosomal protein of 290 kDa polypeptide is a human centrosomal protein of 290 kDa polypeptide (see e.g., UniProt accession number: 015078). In some embodiments, the polynucleotide comprises the coding sequence of a wild-type CEP290 gene (see e.g., NCBI Gene ID: 80184, SEQ ID NO: 574), or a codon-optimized variant thereof (see e.g., SEQ ID NO: 738). In some embodiments, a polynucleotide encoding a centrosomal protein of 290 kDa polypeptide is a polynucleotide that encodes a polypeptide comprising an amino acid sequence having at least 75%, at least 80%, at least 85%, at least 86%, at least 87%, at least 88%, at least 89%, at least 90%, at least 91%, at least 92%, at least 93%, at least 94%, at least 95%, at least 96%, at least 97%, at least 98%, at least 99%, or 100% identity to the sequence of SEQ ID NO: 217. In some embodiments, a polynucleotide encoding a centrosomal protein of 290 kDa polypeptide is a polynucleotide that encodes a polypeptide comprising the amino acid sequence of SEQ ID NO: 217.

[0082] In some embodiments, a polynucleotide encoding a centrosomal protein of 290 kDa polypeptide is a polynucleotide that encodes an N-terminal truncation, a C-terminal truncation, or a fragment of the amino acid sequence of SEQ ID NO: 217. N-terminal truncations, C-terminal truncations, or fragments may comprise at least 10, at least 12, at least 14, at least 16, at least 18, at least 20, at least 30, at least 40, at least 50, at least 75, at least 100, at least 200, at least 300, at least 400, at least 500, at least 600, at least 700, at least 800, at least 900, at least 1,000, but fewer than 2,479, consecutive amino acids of SEQ ID NO: 217.

[0083] In some embodiments, a polynucleotide of the present disclosure encodes a polypeptide. In some embodiments, the polypeptide is a human polypeptide. In some embodiments, the polynucleotide comprises the coding sequence of a wild-type gene (see e.g., SEQ ID NOs: 378-734), or a codon-optimized variant thereof (see e.g., SEQ ID NOs 735-738 and/or SEQ ID NOs: 741-743). In some embodiments, a polynucleotide encoding a polypeptide is a polynucleotide that encodes a polypeptide comprising an amino acid sequence having at least 75%, at least 80%, at least 85%, at least 86%, at least 87%, at least 88%, at least 89%, at least 90%, at least 91%, at least 92%, at least 93%, at least 94%, at least 95%, at least 96%, at least 97%, at least 98%, at least 99%, or 100% identity to an amino acid sequence selected from SEQ ID NOs: 21-377 and/or SEQ ID NOs: 739-740. In some embodiments, a polynucleotide of the present disclosure encodes a polypeptide comprising an amino acid sequence selected from SEQ ID NOs: 21-377 and/or SEQ ID NOs: 739-740.

[0084] In some embodiments, a polynucleotide encoding a polypeptide is a polynucleotide that encodes an N-terminal truncation, a C-terminal truncation, or a fragment of the amino acid sequence selected from SEQ ID NOs: 21-377 and/or SEQ ID NOs: 739-740. N-terminal truncations, C-terminal truncations, or fragments may comprise, for example, at least 10, at least 12, at least 14, at least 16, at least 18, at least 20, at least 30, at least 40, at least 50, at least 75, at least 100, at least 200, at least 300, at least 400, etc., consecutive amino acids selected from SEQ ID NOs: 21-377 and/or SEQ ID NOs: 739-740.

[0085] In some embodiments, a polynucleotide of the present disclosure encodes any one or more of a/an sterile alpha motif domain-containing protein 11, nephrocystin-4, espin, nicotinamide/nicotinic acid mononucleotide adenylyltransferase 1, mitofusin-2, ER membrane protein complex subunit 1, phospholipase A2 group V, dehydrodolichyl diphosphate synthase complex subunit, palmitoyl-protein thioesterase 1, elongation of very long chain fatty acids protein 1, Protein O-linked-mannose beta-1,2-N-acetylglucosaminyltransferase 1, Retinoid isomerohydrolase, Retinal-specific phospholipid-transporting ATPase, Collagen alpha-1 (XI), Guanine nucleotide-binding protein G(t) subunit alpha-2, Chloride channel CLIC-like protein 1, DNA damage-regulated autophagy modulator protein 2, U4/U6 small nuclear ribonucleoprotein Prp3, Alpha-endosulfine, Semaphorin-4A, Cyclic AMP-dependent transcription factor ATF-6 alpha, Hemicentin-1, Complement factor H, Protein crumbs homolog 1, Adiponectin receptor protein 1, Protein RD3, Serine/threonine-protein kinase Nek2, Feline leukemia virus subgroup C receptor-related protein 1, Usherin, Serologically defined colon cancer antigen 8, Olfactory receptor 2W3, NBAS subunit of NRZ tethering complex, Cytosolic carboxypeptidase-like protein 5, Zinc finger protein 513, Intraflagellar transport protein 172 homolog, Photoreceptor cilium actin regulator, EGF-containing fibulin-like extracellular matrix protein 1/TLE family member 5, Protein FAM161A, WD repeat-containing and planar cell polarity effector protein fritz homolog, Centrosome-associated protein ALMS1, U5 small nuclear ribonucleoprotein 200 kDa helicase, Metal transporter CNNM4, Cyclic nucleotide-gated cation channel alpha-3, Nephrocystin-1, Tyrosine-protein kinase Mer, Bardet-Biedl syndrome 5 protein, Ceramide kinase-like protein, Neurogenic differentiation factor 1, Transmembrane protein 237, Inward rectifier potassium channel 13, S-arrestin, Secreted phosphoprotein 24, CCA tRNA nucleotidyltransferase 1, mitochondrial, Sodium bicarbonate cotransporter 3, Leucine zipper transcription factor-like protein 1, Guanine nucleotide-binding protein G(t) subunit alpha-1, Three-prime repair exonuclease 1, MAP kinase-activated protein kinase 3, Ataxin-7, Vitamin K-dependent protein S, ADP-ribosylation factor-like protein 6, Interphotoreceptor matrix proteoglycan 2, IQ calmodulin-binding motif-containing protein 1, Rhodopsin, Nephrocystin-3, Clarin-1, Probable cationic amino acid transporter/Solute carrier family 7 member 14, Choline-phosphate cytidylyltransferase A, Centrosomal protein of 19 kDa, Rod cGMP-specific 3′,5′-cyclic phosphodiesterase subunit beta, Wolframin, Homeobox protein HMX1, Ras-related protein Rab-28, Coiled-coil and C2 domain-containing protein 2A, Prominin-1, Adhesion G protein-coupled receptor A3, Death domain-containing protein 1, WD repeat-containing protein 19, cGMP-gated cation channel alpha-1, CDGSH iron-sulfur domain-containing protein 2, Microsomal triglyceride transfer protein large subunit, Leucine-rich repeat, immunoglobulin-like domain and transmembrane domain-containing protein 3, Bardet-Biedl syndrome 7 protein, Bardet-Biedl syndrome 12 protein, Major facilitator superfamily domain-containing protein 8, Serine/threonine-protein kinase PLK4, Lecithin retinol acyltransferase, Toll-like receptor 3, Cytochrome P450 4V2, Spliceosome-associated protein CWC27 homolog, Centrosomal protein POC5, Versican core protein, Adhesion G-protein coupled receptor V1, COUP transcription factor 1, Mitochondrial outer membrane protein SLC25A46, Catenin alpha-1, Histidine-tRNA ligase, cytoplasmic, Rod cGMP-specific 3′,5′-cyclic phosphodiesterase subunit alpha, Metabotropic glutamate receptor 6, Serine/threonine-protein kinase MAK, Complement C2, Complement factor B, Tubby-related protein 1, Guanylyl cyclase-activating protein 1, Guanylyl cyclase-activating protein 2, Peripherin-2, Interphotoreceptor matrix proteoglycan 1, Protein eyes shut homolog, Collagen alpha-1 (IX) chain, Regulating synaptic membrane exocytosis protein 1, Lebercilin, Elongation of very long chain fatty acids protein 4, PR domain zinc finger protein 13, Reticulon-4-interacting protein 1, mitochondrial, Jouberin, Peroxisomal targeting signal 2 receptor, CCR4-NOT transcription complex subunit 9, Aryl hydrocarbon receptor, Kelch-like protein 7, Retinitis pigmentosa 9 protein, Protein PTHB1, Peroxisomal ATPase PEX1, Tetraspanin-12, Inosine-5′-monophosphate dehydrogenase 1, Short-wave-sensitive opsin 1, UPF0606 protein KIAA1549, Retinitis pigmentosa 1-like 1 protein, Disintegrin and metalloproteinase domain-containing protein 9, Heparan-alpha-glucosaminide N-acetyltransferase, Oxygen-regulated protein 1, Alpha-tocopherol transfer protein, Centrosome and spindle pole-associated protein 1, Dynamin-like 120 kDa protein, mitochondrial, Peroxisome biogenesis factor 2, Cyclic nucleotide-gated cation channel beta-3, Cilia- and flagella-associated protein 418, Growth/differentiation factor 6, Regulating synaptic membrane exocytosis protein 2, Potassium voltage-gated channel subfamily V member 2, E3 ubiquitin-protein ligase Topors, Centrosomal protein of 78 kDa, Inversin, U4/U6 small nuclear ribonucleoprotein Prp4, Whirlin, E3 ubiquitin-protein ligase TRIM32, Toll-like receptor 4, Cytoplasmic dynein 2 intermediate chain 2, Programmed cell death protein 2, Exosome complex component RRP4, Phosphatidylinositol polyphosphate 5-phosphatase type IV, Phytanoyl-CoA dioxygenase, peroxisomal, Acyl-CoA-binding domain-containing protein, Protocadherin-15, Retinol-binding protein 3, DNA excision repair protein ERCC-6, Hexokinase-1, Cadherin-23, Cadherin-related family member 1, RPE-retinal G protein-coupled receptor, Kinesin-like protein KIF11, Retinol-binding protein 4, Cone cGMP-specific 3′,5′-cyclic phosphodiesterase subunit alpha, Paired box protein Pax-2, PDZ domain-containing protein 7, ADP-ribosylation factor-like protein 3, BBSome-interacting protein 1, Age-related maculopathy susceptibility protein 2, Serine protease HTRA1, Ornithine aminotransferase, mitochondrial, Zinc finger protein 408, Tubby protein homolog, Transcriptional enhancer factor TEF-1, Harmonin, Transmembrane protein 216, Bestrophin-1, Isoaspartyl peptidase/L-asparaginase, Rod outer segment membrane protein 1, Bardet-Biedl syndrome 1 protein, Calcium-binding protein 4, Low-density lipoprotein receptor-related protein 5, Calpain-5, Unconventional myosin-VIIa, Transmembrane protein 126A, Frizzled-4, Cytoplasmic dynein 2 light intermediate chain 1, Centrosomal protein of 164 kDa, Complement C1q tumor necrosis factor-related protein 5, Membrane frizzled-related protein, Voltage-dependent calcium channel subunit alpha-2/delta-4, Guanine nucleotide-binding protein G(I)/G(S)/G(T) subunit beta-3, Retinal cone rhodopsin-sensitive cGMP 3′,5′-cyclic phosphodiesterase subunit gamma, Collagen alpha-1 (II) chain, Matrix metalloproteinase-19, Retinol dehydrogenase 5, T-complex protein 1 subunit beta, Bardet-Biedl syndrome 10 protein, Centrosomal protein of 290 kDa, POC1 centriolar protein homolog B, Mevalonate kinase, Intraflagellar transport protein 81 homolog, Mitochondrial translation release factor in rescue, Integral membrane protein 2B, Retinoblastoma-associated protein, RCC1 and BTB domain-containing protein 1, Rhodopsin kinase GRK1, X-linked retinitis pigmentosa GTPase regulator-interacting protein 1, Neural retina-specific leucine zipper protein, Homeobox protein OTX2, Retinol dehydrogenase 11, Retinol dehydrogenase 12, Tubulin polyglutamylase TTLL5, Spermatogenesis-associated protein 7, Tetratricopeptide repeat protein 8, Fibulin-5, Transient receptor potential cation channel subfamily M member 1, Gamma-tubulin complex component 4, Sodium/potassium/calcium exchanger 1, Photoreceptor-specific nuclear receptor, Bardet-Biedl syndrome 4 protein, Calcium and integrin-binding family member 2, Retinaldehyde-binding protein 1, N-acetylglucosamine-1-phosphotransferase subunit gamma, Intraflagellar transport protein 140 homolog, Clusterin-associated protein 1, ATP-binding cassette sub-family C member 6, Ketimine reductase mu-crystallin, Battenin, Zinc finger protein 423, Protein fantom, Bardet-Biedl syndrome 2 protein, ADP-ribosylation factor-like protein 2-binding protein, Cyclic nucleotide-gated cation channel beta-1, Cadherin-3, Pre-mRNA-splicing factor ATP-dependent RNA helicase PRP16, A disintegrin and metalloproteinase with thrombospondin motifs 18, Solute carrier family 38 member 8, Retinal guanylyl cyclase 1, Pre-mRNA-processing-splicing factor 8, Aryl-hydrocarbon-interacting protein-like 1, Membrane-associated phosphatidylinositol transfer protein 3, Protein unc-119 homolog A, Probable G-protein coupled receptor 179, Tectonic-like complex member MKS1, Carbonic anhydrase 4, Regulator of G-protein signaling 9, Arylsulfatase G, pre-mRNA splicing regulator USH1G, Photoreceptor disk component PRCD, Fascin-2, Retinal rod rhodopsin-sensitive cGMP 3′,5′-cyclic phosphodiesterase subunit gamma, Laminin subunit alpha-1, AFG3-like protein 2, Cone-rod homeobox protein, Receptor expression-enhancing protein 6, Retina and anterior neural fold homeobox protein 2, Complement C3, Rho guanine nucleotide exchange factor 18, Patatin-like phospholipase domain-containing protein 6, Regulator of G-protein signaling 9-binding protein, Optic atrophy 3 protein, U4/U6 small nuclear ribonucleoprotein Prp31, Isocitrate dehydrogenase [NAD] subunit beta, mitochondrial, Pantothenate kinase 2, mitochondrial, Protein jagged-1, Molecular chaperone MKKS, Centrosomal protein kizuna, Lysophosphatidylserine lipase ABHD12, Kinesin-like protein KIF3B, Centrosome-associated protein CEP250, Pre-mRNA-processing factor 6, Cilia- and flagella-associated protein 410, Dynamin-1-like protein, Metalloproteinase inhibitor 3, Intraflagellar transport protein 27 homolog, Fibulin-1, MIEF1 upstream open reading frame protein, Aconitate hydratase, mitochondrial, Gamma-tubulin complex component 6, Centriole and centriolar satellite protein, Retinoschisin, Protein XRP2, Dystrophin, X-linked retinitis pigmentosa GTPase regulator, Nyctalopin, Xaa-Pro dipeptidase, Norrin, Voltage-dependent L-type calcium channel subunit alpha-1F, Phosphoglycerate kinase 1, Rab proteins geranylgeranyltransferase component A 1, Mitochondrial import inner membrane translocase subunit Tim8 A, Ribose-phosphate pyrophosphokinase 1, Long-wave-sensitive opsin 1, Medium-wave-sensitive opsin 1, Short-wave-sensitive opsin 1, Transcription factor A, mitochondrial, NADH-ubiquinone oxidoreductase chain 1, NADH-ubiquinone oxidoreductase chain 2, NADH-ubiquinone oxidoreductase chain 3, NADH-ubiquinone oxidoreductase chain 4L, NADH-ubiquinone oxidoreductase chain 4, NADH-ubiquinone oxidoreductase chain 5, NADH-ubiquinone oxidoreductase chain 6, ATP synthase subunit a, ATP synthase protein 8, Cytochrome c oxidase subunit 1, Cytochrome c oxidase subunit 3, Cytochrome b, Leucine-tRNA ligase, mitochondrial, Nondiscriminating glutamyl-tRNA synthetase EARS2, mitochondrial, Lysine-tRNA ligase, Histidine-tRNA ligase, mitochondrial, Serine-tRNA ligase, mitochondrial, Probable proline-tRNA ligase, mitochondrial, Cyanocobalamin reductase/alkylcobalamin dealkylase, POU domain, class 3, transcription factor 4, Ribosomal protein S6 kinase alpha-6, Ciliogenesis and planar polarity effector 1, Meckelin, TRAF3-interacting protein 1, Intraflagellar transport protein 74 homolog, S phase cyclin A-associated protein in the endoplasmic reticulum, Sodium channel and clathrin linker 1, Protein TALPID3, Tectonic-2, ADP-ribosylation factor-like protein 13B, B9 domain-containing protein 1, B9 domain-containing protein 2, C2 domain-containing protein 3, Centrosomal protein of 41 kDa, Centrosomal protein of 104 kDa, Centrosomal protein of 120 kDa, Intraflagellar transport protein 172 homolog, Katanin-interacting protein, Kinesin-like protein KIF7, Retinal rod rhodopsin-sensitive cGMP 3′,5′-cyclic phosphodiesterase subunit delta, Tectonic-1, Tectonic-3, Transmembrane protein 107, Transmembrane protein 138, Transmembrane protein 231, Tetratricopeptide repeat protein 21B, Nuclear receptor ROR-alpha, Beta-nerve growth factor, Collagen alpha-2 (VIII) chain, Solute carrier family 4 member 11, Zinc finger E-box-binding homeobox 1, Keratin, type II cuticular Hb3, Keratin, type I cytoskeletal 12, Transforming growth factor-beta-induced protein ig-h3, Tumor-associated calcium signal transducer 2, Carbohydrate sulfotransferase 6, Gelsolin, UbiA prenyltransferase domain-containing protein 1, Decorin, 1-phosphatidylinositol 3-phosphate 5-kinase, Transcription factor Ovo-like 2, Grainyhead-like protein 2 homolog, and/or any chimeric polypeptides thereof, in any suitable combination.

[0086] A polynucleotide of the present disclosure encoding a polypeptide may further encode additional coding and non-coding sequences. Examples of additional coding and non-coding sequences may include, but are not limited to, sequences encoding additional polypeptide tags (e.g., encoded in-frame with the polypeptide in order to produce a fusion protein), introns (e.g., native, modified, or heterologous introns), 5′ and/or 3′ UTRs (e.g., native, modified, or heterologous 5′ and/or 3′ UTRs), and the like. Examples of suitable polypeptide tags may include, but are not limited, to any combination of purification tags, such as his-tags, flag-tags, maltose binding protein and glutathione-S-transferase tags, detection tags, such as tags that may be detected photometrically (e.g., green fluorescent protein, red fluorescent protein, etc.) and tags that have a detectable enzymatic activity (e.g., alkaline phosphatase, etc.), tags containing secretory sequences, signal sequences, leader sequences, and/or stabilizing sequences, protease cleavage sites (e.g., furin cleavage sites, TEV cleavage sites, Thrombin cleavage sites, etc.), and the like. In some embodiments, the 5′ and/or 3′UTRs increase the stability, localization, and/or translational efficiency of the polynucleotides. In some embodiments, the 5′ and/or 3′UTRs improve the level and/or duration of protein expression. In some embodiments, the 5′ and/or 3′UTRs include elements (e.g., one or more miRNA binding sites, etc.) that may block or reduce off-target expression (e.g., inhibiting expression in specific cell types (e.g., neuronal cells), at specific times in the cell cycle, at specific developmental stages, etc.). In some embodiments, the 5′ and/or 3′UTRs include elements (e.g., one or more miRNA binding sites, etc.) that may enhance expression of the encoded polypeptide in specific cell types.

[0087] In some embodiments, a polynucleotide of the present disclosure encoding a polypeptide is operably linked to one or more (e.g., one or more, two or more, three or more, four or more, five or more, ten or more, etc.) regulatory sequences. The term “regulatory sequence” may include enhancers, insulators, promoters, and other expression control elements (e.g., polyadenylation signals). Any suitable enhancer(s) known in the art may be used, including, for example, enhancer sequences from mammalian genes (such as globin, elastase, albumin, α-fetoprotein, insulin and the like), enhancer sequences from a eukaryotic cell virus (such as SV40 enhancer on the late side of the replication origin (bp 100-270), the cytomegalovirus early promoter enhancer, the polyoma enhancer on the late side of the replication origin, adenovirus enhancers, and the like), and any combinations thereof. Any suitable insulator(s) known in the art may be used, including, for example, HSV chromatin boundary (CTRL/CTCF-binding/insulator) elements CTRL1 and/or CTRL2, chicken hypersensitive site 4 insulator (cHS4), human HNRPA2B1-CBX3 ubiquitous chromatin opening element (UCOE), the scaffold/matrix attachment region (S/MAR) from the human interferon beta gene (IFNB1), and any combinations thereof. Any suitable promoter (e.g., suitable for transcription in mammalian host cells) known in the art may be used, including, for example, promoters obtained from the genomes of viruses (such as polyoma virus, fowlpox virus, adenovirus (such as Adenovirus 2), bovine papilloma virus, avian sarcoma virus, cytomegalovirus, a retrovirus, hepatitis-B virus, Simian Virus 40 (SV40), and the like), promoters from heterologous mammalian genes (such as the actin promoter (e.g., the β-actin promoter), a ubiquitin promoter (e.g., a ubiquitin C (UbC) promoter), a phosphoglycerate kinase (PGK) promoter, an immunoglobulin promoter, from heat-shock promoters, and the like), promoters from homologous mammalian genes, synthetic promoters (such as the CAG promoter), and any combinations thereof, provided such promoters are compatible with the host cells. Regulatory sequences may include those which direct constitutive expression of a nucleic acid, as well as tissue-specific regulatory and/or inducible or repressible sequences.

[0088] In some embodiments, a polynucleotide of the present disclosure is operably linked to one or more heterologous promoters. In some embodiments, the one or more heterologous promoters are one or more of constitutive promoters, tissue-specific promoters, temporal promoters, spatial promoters, inducible promoters, and repressible promoters. In some embodiments, the one or more heterologous promoters are one or more of the human cytomegalovirus (HCMV) immediate early promoter, the human elongation factor-1 (EF1) promoter, the human β-actin promoter, the human UbC promoter, the human PGK promoter, the synthetic CAGG promoter, and any combinations thereof. In some embodiments, a polynucleotide of the present disclosure encoding a polypeptide is operably linked to an HCMV promoter.

[0089] In some embodiments, a polynucleotide of the present disclosure encoding a polypeptide expresses the polypeptide when the polynucleotide is delivered into one or more target cells of a subject (e.g., one or more cells of the eye, anterior chamber, posterior chamber, ciliary body, corneal epithelial cell, rod cell, cone cell, photoreceptor, retinal pigment epithelial cell, retinal ganglion cell, bipolar cell, horizontal cell, muller cell, amacrine cell, etc. of the subject). In some embodiments, expression of the polypeptide enhances, increases, augments, and/or supplements the levels, function, and/or activity of the polypeptide in one or more target cells of a subject (e.g., as compared to prior to expression of the polypeptide, as compared to levels of the endogenous polypeptide expressed in the cell, etc.). In some embodiments, expression of the polypeptide provides prophylactic, palliative, or therapeutic relief of one or more signs or symptoms of an eye condition or disease in a subject (e.g., as compared to prior to expression of the polypeptide).

### Chimeric Polypeptides

[0090] In some embodiments, a polynucleotide of the present disclosure encodes a chimeric polypeptide comprising a first polypeptide and a second polypeptide. In some embodiments, the first and second polypeptides are the same. In some embodiments, the first and second polypeptides are different. In some embodiments, the chimeric polypeptide further comprises a linker polypeptide linking the first and second polypeptides. In some embodiments, the chimeric polypeptide comprises, from n-terminus to c-terminus, the first polypeptide-the linker polypeptide-the second polypeptide. The first and/or second polypeptides may be any of the polypeptides described herein or known in the art.

[0091] In some embodiments, the linker polypeptide is a cleavable linker polypeptide. Any cleavable linker polypeptide known in the art may be used in the chimeric polypeptides of the present disclosure, including, for example, a T2A linker, a P2A linker, a E2A linker, and F2A linker, etc. In some embodiments, the linker polypeptide is a T2A linker polypeptide. An exemplary nucleic acid sequence encoding a T2A linker polypeptide is provided as SEQ ID NO: 1. An exemplary amino acid sequence of a T2A linker polypeptide is provided as SEQ ID NO: 5. In some embodiments, the linker polypeptide is a P2A linker polypeptide. An exemplary nucleic acid sequence encoding a P2A linker polypeptide is provided as SEQ ID NO: 2. An exemplary amino acid sequence of a P2A linker polypeptide is provided as SEQ ID NO: 6. In some embodiments, the linker polypeptide is an E2A linker polypeptide. An exemplary nucleic acid sequence encoding an E2A linker polypeptide is provided as SEQ ID NO: 3. An exemplary amino acid sequence of an E2A linker polypeptide is provided as SEQ ID NO: 7. In some embodiments, the linker polypeptide is an F2A linker polypeptide. An exemplary nucleic acid sequence encoding an F2A linker polypeptide is provided as SEQ ID NO: 4. An exemplary amino acid sequence of an F2A linker polypeptide is provided as SEQ ID NO: 8. In some embodiments, the linker polypeptide comprises a sequence having at least 80%, at least 85%, at least 90%, at least 91%, at least 92%, at least 93%, at least 94%, at least 95%, at least 96%, at least 97%, at least 98%, at least 99%, or 100% sequence identity to an amino acid sequence selected from SEQ ID NOS: 68-71. In some embodiments, the linker polypeptide comprises a sequence selected from SEQ ID NOS: 5-8.

[0092] In some embodiments, the linker polypeptide is a non-cleavable linker polypeptide. Any non-cleavable linker polypeptide known in the art may be used in the chimeric polypeptides of the present disclosure, including, for example, a GGGGSGGGGSGGGGS (SEQ ID NO: 9) linker, a GGSSRSSSSGGGGSGGGG (SEQ ID NO: 10) linker, a GGGGSGGGGSGGGGGGGGS (SEQ ID NO: 11) linker, a CGGGSGGGGSGGGGS (SEQ ID NO: 12) linker, a SHGGHGGGGSGGGGS (SEQ ID NO: 13) linker, a MGGMSGGGGSGGGGS (SEQ ID NO: 14) linker, a YGGYSGGGGSGGGGS (SEQ ID NO: 15) linker, a WGGYSGGGGSGGGGS (SEQ ID NO: 16) linker, a SVSVGMKPSPRP (SEQ ID NO: 17) linker, a VISNHAGSSRRL (SEQ ID NO: 18) linker, a PWIPTPRPTFTG (SEQ ID NO: 19) linker, a RGRGRGRGRGR (SEQ ID NO: 20) linker, etc. In some embodiments, the linker polypeptide comprises a sequence having at least 80%, at least 85%, at least 90%, at least 91%, at least 92%, at least 93%, at least 94%, at least 95%, at least 96%, at least 97%, at least 98%, at least 99%, or 100% sequence identity to an amino acid sequence selected from SEQ ID NOS: 9-20. In some embodiments, the linker polypeptide comprises a sequence selected from SEQ ID NOS: 9-20.

[0093] In some embodiments, a polynucleotide of the present disclosure does not comprise the coding sequence of (e.g., a transgene encoding) a Collagen alpha-1 (VII) chain polypeptide (COL7). In some embodiments, a polynucleotide of the present disclosure does not comprise the coding sequence of (e.g., a transgene encoding) a Lysyl hydroxylase 3 polypeptide (LH3). In some embodiments, a polynucleotide of the present disclosure does not comprise the coding sequence of (e.g., a transgene encoding) a Keratin type I cytoskeletal 17 polypeptide (KRT17). In some embodiments, a polynucleotide of the present disclosure does not comprise the coding sequence of (e.g., a transgene encoding) a transglutaminase (TGM) polypeptide (e.g., a human transglutaminase polypeptide such as a human TGM1 polypeptide and/or a human TGM5 polypeptide). In some embodiments, a polynucleotide of the present disclosure does not comprise the coding sequence of (e.g., a transgene encoding) a cosmetic protein (e.g., collagen proteins, fibronectins, elastins, lumicans, vitronectins/vitronectin receptors, laminins, neuromodulators, fibrillins, additional dermal extracellular matrix proteins, etc.). In some embodiments, a polynucleotide of the present disclosure does not comprise the coding sequence of (e.g., a transgene encoding) an antibody (e.g., a full-length antibody, an antibody fragment, etc.). In some embodiments, a polynucleotide of the present disclosure does not comprise the coding sequence of (e.g., a transgene encoding) a Serine Protease Inhibitor Kazal-type (SPINK) polypeptide (e.g., a human SPINK polypeptide, such as a SPINK5 polypeptide). In some embodiments, a polynucleotide of the present disclosure does not comprise the coding sequence of (e.g., a transgene encoding) a filaggrin or filaggrin 2 polypeptide (e.g., a human filaggrin or filaggrin 2 polypeptide). In some embodiments, a polynucleotide of the present disclosure does not comprise the coding sequence of (e.g., a transgene encoding) a Cystic Fibrosis Transmembrane Conductance Regulator (CFTR) polypeptide (e.g., a human CFTR polypeptide). In some embodiments, a polynucleotide of the present disclosure does not comprise the coding sequence of (e.g., a transgene encoding) an ichthyosis-associated polypeptide (e.g., an ATP-binding cassette sub-family A member 12 polypeptide, a 1-acylglycerol-3-phosphate O-acyltransferase ABHD5 polypeptide, an Aldehyde dehydrogenase family 3 member A2 polypeptide, an Arachidonate 12-lipoxygenase 12R-type polypeptide, a Hydroperoxide isomerase ALOXE3 polypeptide, an AP-1 complex subunit sigma-1A polypeptide, an Arylsulfatase E polypeptide, a Caspase-14 polypeptide, a Corneodesmosin polypeptide, a Ceramide synthase 3 polypeptide, a Carbohydrate sulfotransferase 8 polypeptide, a Claudin-1 polypeptide, a Cystatin-A polypeptide, a Cytochrome P450 4F22 polypeptide, a 3-beta-hydroxysteroid-Delta (8), Delta (7)-isomerase polypeptide, an Elongation of very long chain fatty acids protein 4 polypeptide, a Filaggrin polypeptide, a Filaggrin 2 polypeptide, a Gap junction beta-2 polypeptide, a Gap junction beta-3 polypeptide, a Gap junction beta-4 polypeptide, a Gap junction beta-6 polypeptide, a 3-ketodihydrosphingosine reductase polypeptide, a Keratin, type II cytoskeletal 1 polypeptide, a Keratin, type II cytoskeletal 2 epidermal polypeptide, a Keratin, type I cytoskeletal 9 polypeptide, a Keratin, type I cytoskeletal 10 polypeptide, a Lipase member N polypeptide, a Loricrin polypeptide, a Membrane-bound transcription factor site-2 protease polypeptide, a Magnesium transporter NIPA4 polypeptide, a Sterol-4-alpha-carboxylate 3-dehydrogenase, decarboxylating polypeptide, a Peroxisomal targeting signal 2 receptor polypeptide, a D-3-phosphoglycerate dehydrogenase polypeptide, a Phytanoyl-CoA dioxygenase, peroxisomal polypeptide, Patatin-like phospholipase domain-containing protein 1 polypeptide, a Proteasome maturation protein polypeptide, a Phosphoserine aminotransferase polypeptide, a Short-chain dehydrogenase/reductase family 9C member 7 polypeptide, a Serpin B8 polypeptide, a Long-chain fatty acid transport protein 4 polypeptide, a Synaptosomal-associated protein 29 polypeptide, a Suppressor of tumorigenicity 14 protein polypeptide, a Steryl-sulfatase polypeptide, a Vacuolar protein sorting-associated protein 33B polypeptide, and a CAAX prenyl protease 1 homolog polypeptide). In some embodiments, a polynucleotide of the present disclosure does not comprise the coding sequence of (e.g., a transgene encoding) a Collagen alpha-1 (VII) chain polypeptide, a Lysyl hydroxylase 3 polypeptide, a Keratin type I cytoskeletal 17 polypeptide, and/or any chimeric polypeptides thereof. In some embodiments, a polynucleotide of the present disclosure does not comprise the coding sequence of (e.g., a transgene encoding) a Collagen alpha-1 (VII) chain polypeptide, a Lysyl hydroxylase 3 polypeptide, a Keratin type I cytoskeletal 17 polypeptide, a transglutaminase (TGM) polypeptide, a filaggrin polypeptide, a cosmetic protein, an antibody, a SPINK polypeptide, a CFTR polypeptide, an ichthyosis-associated polypeptide, an Alpha-1-antitrypsin polypeptide, a Sodium-dependent phosphate transport protein 2B polypeptide, a Dynein heavy chain 5 axonemal polypeptide, a Dynein heavy chain 11 axonemal polypeptide, a Coiled-coil domain-containing protein 39 polypeptide, a Dynein intermediate chain 1 axonemal polypeptide, a Coiled-coil domain-containing protein 40 polypeptide, a Coiled-coil domain containing protein 103 polypeptide, a Sperm-associated antigen 1 polypeptide, a Zinc finger MYND domain-containing protein 10 polypeptide, an Armadillo repeat containing protein 4 polypeptide, a Coiled-coil domain-containing protein 151 polypeptide, a Dynein intermediate chain 2 axonemal polypeptide, a Radial spoke head 1 homolog polypeptide, a Coiled-coil domain-containing protein 114 polypeptide, a Radial spoke head protein 4 homolog A polypeptide, a Dynein assembly factor 1 axonemal polypeptide, a Dynein assembly factor 2 axonemal polypeptide, a Leucine-rich repeat-containing protein 6 polypeptide, a Pulmonary surfactant-associated protein B polypeptide, a Pulmonary surfactant-associated protein C polypeptide, a Homeobox protein Nkx-2.1 polypeptide, an ATP-binding cassette sub-family A member 3 polypeptide, a Cytokine receptor common subunit beta polypeptide, a Granulocyte-macrophage colony-stimulating factor receptor subunit alpha polypeptide, a Bone morphogenetic protein receptor type-2 polypeptide, a Sarcoplasmic/endoplasmic reticulum calcium ATPase 2 polypeptide, a serine/threonine-protein kinase receptor R3 polypeptide, an Endoglin polypeptide, a Mothers against decapentaplegic homolog 9 polypeptide, a Caveolin-1 polypeptide, a Potassium channel subfamily K member 3 polypeptide, an elF-2-alpha kinase GCN2 polypeptide, a Pulmonary surfactant-associated protein A2 polypeptide, a Telomerase reverse transcriptase polypeptide, a Dyskerin polypeptide, a Regulator of telomere elongation helicase 1 polypeptide, a Poly(A)-specific ribonuclease PARN polypeptide, a TERF1-interacting nuclear factor 2 polypeptide, an H/ACA ribonucleoprotein complex non-core subunit NAF1 polypeptide, a Mucin-5B polypeptide, a Desmoplakin polypeptide, a CST complex subunit STN1 polypeptide, a Dipeptidyl peptidase 9 polypeptide, and/or any chimeric polypeptides thereof.

[0094] In some embodiments, a polynucleotide of the present disclosure does not comprise the coding sequence of (e.g., a transgene encoding) an immunomodulatory polypeptide. In some embodiments, a polynucleotide of the present disclosure does not comprise the coding sequence of (e.g., a transgene encoding) a cytokine polypeptide and/or a chemokine polypeptide. In some embodiments, a polynucleotide of the present disclosure does not comprise the coding sequence of (e.g., a transgene encoding) a cytokine polypeptide. In some embodiments, a polynucleotide of the present disclosure does not comprise the coding sequence of (e.g., a transgene encoding) an IL-1 polypeptide, an IL-2 polypeptide, an IL-7 polypeptide, an IL-12 polypeptide, an IL-13 polypeptide, an IL-15 polypeptide, an IL-17 polypeptide, an IL-18 polypeptide, an IL-28 polypeptide, an IL-32 polypeptide, an IL-33 polypeptide, an IL-34 polypeptide, a TNFα polypeptide, an IFNγ polypeptide, a G-CSF polypeptide, a GM-CSF polypeptide, and/or any chimeric polypeptides thereof.

[0095] In some embodiments, a polynucleotide of the present disclosure does not comprise the coding sequence of (e.g., a transgene encoding) a chemokine polypeptide. In some embodiments, a polynucleotide of the present disclosure does not comprise the coding sequence of (e.g., a transgene encoding) a CXCL1 polypeptide, a CXCL2 polypeptide, a CXCL8 polypeptide, a CXCL9 polypeptide, a CXCL11 polypeptide, a CXCL16 polypeptide, a CCL2 polypeptide, a CCL3 polypeptide, a CCL4 polypeptide, a CCL5 polypeptide, a CCL11 polypeptide, and/or any chimeric polypeptides thereof.

### Recombinant Nucleic Acids

[0096] In some embodiments, the present disclosure relates to recombinant nucleic acids comprising any one or more of the polynucleotides described herein. In some embodiments, the recombinant nucleic acid is a vector (e.g., an expression vector, a display vector, etc.). In some embodiments, the vector is a DNA vector or an RNA vector. Generally, vectors suitable to maintain, propagate, and/or express polynucleotides to produce one or more polypeptides in a subject may be used. Examples of suitable vectors may include, for example, plasmids, cosmids, episomes, transposons, and viral vectors (e.g., adenoviral vectors, adeno-associated viral vectors, vaccinia viral vectors, Sindbis-viral vectors, measles vectors, herpes viral vectors, lentiviral vectors, retroviral vectors, etc.). In some embodiments, the vector is a herpes viral vector. In some embodiments, the vector is capable of autonomous replication in a host cell. In some embodiments, the vector is incapable of autonomous replication in a host cell. In some embodiments, the vector can integrate into a host DNA. In some embodiments, the vector cannot integrate into a host DNA (e.g., is episomal). Methods of making vectors containing one or more polynucleotides of interest are well known to one of ordinary skill in the art, including, for example, by chemical synthesis or by artificial manipulation of isolated segments of nucleic acids (e.g., by genetic engineering techniques).

[0097] In some embodiments, a recombinant nucleic acid of the present disclosure is a herpes simplex virus (HSV) amplicon. Herpes virus amplicons, including the structural features and methods of making the same, are generally known to one of ordinary skill in the art (see e.g., de Silva S. and Bowers W. “Herpes Virus Amplicon Vectors”. Viruses 2009, 1, 594-629). In some embodiments, the herpes simplex virus amplicon is an HSV-1 amplicon. In some embodiments, the herpes simplex virus amplicon is an HSV-1 hybrid amplicon. Examples of HSV-1 hybrid amplicons may include, but are not limited to, HSV/AAV hybrid amplicons, HSV/EBV hybrid amplicons, HSV/EBV/RV hybrid amplicons, and/or HSV/Sleeping Beauty hybrid amplicons. In some embodiments, the amplicon is an HSV/AAV hybrid amplicon. In some embodiments, the amplicon is an HSV/Sleeping Beauty hybrid amplicon.

[0098] In some embodiments, a recombinant nucleic acid of the present disclosure is a recombinant herpes virus genome. The recombinant herpes virus genome may be a recombinant genome from any member of the Herpesviridae family of DNA viruses known in the art, including, for example, a recombinant herpes simplex virus genome, a recombinant varicella zoster virus genome, a recombinant human cytomegalovirus genome, a recombinant herpesvirus 6A genome, a recombinant herpesvirus 6B genome, a recombinant herpesvirus 7 genome, a recombinant Epstein-Barr virus genome, a recombinant Kaposi's sarcoma-associated herpesvirus genome, and any combinations or derivatives thereof. In some embodiments, the recombinant herpes virus genome comprises one or more (e.g., one or more, two or more, three or more, four or more, five or more, six or more, seven or more, eight or more, nine or more, ten or more, etc.) inactivating mutations. As used herein, an “inactivating mutation” may refer to any mutation that results in a gene or regulon product (RNA or protein) having reduced, undetectable, or eliminated quantity and/or function (e.g., as compared to a corresponding sequence lacking the inactivating mutation). Examples of inactivating mutations may include, but are not limited to, deletions, insertions, point mutations, and rearrangements in transcriptional control sequences (promoters, enhancers, insulators, etc.) and/or coding sequences of a given gene or regulon. Any suitable method of measuring the quantity of a gene or regulon product known in the art may be used, including, for example, qPCR, Northern blots, RNAseq, western blots, ELISAs, etc. In some embodiments, the one or more inactivating mutations are in one or more (e.g., one or more, two or more, three or more, four or more, five or more, six or more, seven or more, eight or more, nine or more, ten or more, etc.) herpes virus genes. In some embodiments, the recombinant herpes virus genome is attenuated (e.g., as compared to a corresponding, wild-type herpes virus genome). In some embodiments, the recombinant herpes virus genome is replication competent. In some embodiments, the recombinant herpes virus genome is replication defective. In some embodiments, the recombinant herpes virus genome is not oncolytic.

[0099] In some embodiments, the recombinant nucleic acid is a recombinant herpes simplex virus (HSV) genome. In some embodiments, the recombinant herpes simplex virus genome comprises one or more (e.g., one or more, two or more, three or more, four or more, five or more, six or more, seven or more, eight or more, nine or more, ten or more, etc.) inactivating mutations. In some embodiments, the one or more inactivating mutations are in one or more (e.g., one or more, two or more, three or more, four or more, five or more, six or more, seven or more, eight or more, nine or more, ten or more, etc.) herpes simplex virus genes. In some embodiments, the recombinant herpes simplex virus genome is attenuated (e.g., as compared to a corresponding, wild-type herpes simplex virus genome). In some embodiments, the recombinant herpes simplex virus genome is replication competent. In some embodiments, the recombinant herpes simplex virus genome is replication defective. In some embodiments, the recombinant herpes simplex virus genome is not oncolytic.

[0100] In some embodiments, the recombinant herpes virus genome is a recombinant herpes simplex virus type 1 (HSV-1) genome, a recombinant herpes simplex virus type 2 (HSV-2) genome, or any derivatives thereof. In some embodiments, the recombinant herpes simplex virus genome is a recombinant HSV-1 genome. In some embodiments, the recombinant HSV-1 genome may be from any HSV-1 strain known in the art, including, for example, strains 17, Ty25, R62, S25, Ku86, S23, R11, Ty148, Ku47, H166_{syn}, 1319-2005, F-13, M-12, 90237, F-17, KOS, 3083-2008, F12g, L2, CD38, H193, M-15, India 2011, 0116209, F-111, 66-207, 2762, 369-2007, 3355, Macintyre, McKrae, 7862, 7-hse, HF10, 1394,2005, 270-2007, OD4, SC16, M-19, 4J1037, 5J1060, J1060, KOS79, 132-1988, 160-1982, H166, 2158-2007, RE, 78326, F18g, F11, 172-2010, H129, F, E4, CJ994, F14g, E03, E22, E10, E06, E11, E25, E23, E35, E15, E07, E12, E14, E08, E19, E13, ATCC 2011, etc. (see e.g., Bowen et al. J Virol. 2019 Apr. 3; 93 (8)). In some embodiments, the recombinant HSV-1 genome is from the KOS strain. In some embodiments, the recombinant HSV-1 genome is not from the McKrae strain. In some embodiments, the recombinant HSV-1 genome is attenuated (e.g., as compared to a corresponding, wild-type HSV-1 genome). In some embodiments, the recombinant HSV-1 genome is replication competent. In some embodiments, the recombinant HSV-1 genome is replication defective. In some embodiments, the recombinant HSV-1 genome is not oncolytic.

[0101] In some embodiments, the recombinant herpes simplex virus genome comprises an inactivating mutation in at least one, at least two, at least three, at least four, at least five, at least six, at least seven, or all eight of the Infected Cell Protein (or Infected Cell Polypeptide) (ICP) 0, ICP4, ICP22, ICP27, ICP47, thymidine kinase (tk), Long Unique Region (UL) 41 and/or UL55 herpes simplex virus genes. In some embodiments, the recombinant herpes simplex virus genome does not comprise an inactivating mutation in the ICP34.5 (one or both copies) and/or ICP47 herpes simplex virus genes (e.g., to avoid production of an immune-stimulating virus). In some embodiments, the recombinant herpes simplex virus genome does not comprise an inactivating mutation in the ICP34.5 (one or both copies) herpes simplex virus gene. In some embodiments, the recombinant herpes simplex virus genome does not comprise an inactivating mutation in the ICP47 herpes simplex virus gene. In some embodiments, the recombinant herpes simplex virus genome does not comprise an inactivating mutation in the ICP34.5 (one or both copies) and ICP47 herpes simplex virus genes. In some embodiments, the recombinant herpes simplex virus genome is not oncolytic. In some embodiments, the recombinant herpes simplex virus genome is not conditionally replication competent. In some embodiments, the recombinant herpes simplex virus genome is not conditionally replication competent in a cancerous cell.

[0102] In some embodiments, the recombinant herpes simplex virus genome comprises an inactivating mutation in the ICP0 gene (one or both copies). In some embodiments, the recombinant herpes simplex virus genome comprises an inactivating mutation in the ICP0 gene (one or both copies), and further comprises an inactivating mutation in the ICP4 (one or both copies), ICP22, ICP27, ICP47, UL41, and/or UL55 genes. In some embodiments, the recombinant herpes simplex virus genome comprises an inactivating mutation in the ICP0 gene (one or both copies), and an inactivating mutation in the ICP4 gene (one or both copies). In some embodiments, the recombinant herpes simplex virus genome comprises an inactivating mutation in the ICP0 gene (one or both copies), and an inactivating mutation in the ICP22 gene. In some embodiments, the recombinant herpes simplex virus genome comprises an inactivating mutation in the ICP0 gene (one or both copies), and an inactivating mutation in the UL41 gene. In some embodiments, the recombinant herpes simplex virus genome comprises an inactivating mutation in the ICP0 gene (one or both copies), an inactivating mutation in the ICP4 gene (one or both copies), and an inactivating mutation in the ICP22 gene. In some embodiments, the recombinant herpes simplex virus genome comprises an inactivating mutation in the ICP0 gene (one or both copies), an inactivating mutation in the ICP4 gene (one or both copies), and an inactivating mutation in the UL41 gene. In some embodiments, the recombinant herpes simplex virus genome comprises an inactivating mutation in the ICP0 gene (one or both copies), an inactivating mutation in the ICP22 gene, and an inactivating mutation in the UL41 gene. In some embodiments, the recombinant herpes simplex virus genome comprises an inactivating mutation in the ICP0 gene (one or both copies), an inactivating mutation in the ICP4 gene (one or both copies), an inactivating mutation in the ICP22 gene, and an inactivating mutation in the UL41 gene. In some embodiments, the inactivating mutation is a deletion of the coding sequence of the ICP0 (one or both copies), ICP4 (one or both copies), ICP22, and/or UL41 genes. In some embodiments, the recombinant herpes simplex virus genome further comprises an inactivating mutation in the ICP27, ICP47, and/or UL55 genes.

[0103] In some embodiments, the recombinant herpes simplex virus genome comprises an inactivating mutation in the ICP4 gene (one or both copies). In some embodiments, the recombinant herpes simplex virus genome comprises an inactivating mutation in the ICP4 gene (one or both copies), and further comprises an inactivating mutation in the ICP0 (one or both copies), ICP22, ICP27, ICP47, UL41, and/or UL55 genes. In some embodiments, the recombinant herpes simplex virus genome comprises an inactivating mutation in the ICP4 gene (one or both copies), and an inactivating mutation in the ICP22 gene. In some embodiments, the recombinant herpes simplex virus genome comprises an inactivating mutation in the ICP4 gene (one or both copies), and an inactivating mutation in the UL41 gene. In some embodiments, the recombinant herpes simplex virus genome comprises an inactivating mutation in the ICP4 gene (one or both copies), an inactivating mutation in the ICP22 gene, and an inactivating mutation in the UL41 gene. In some embodiments, the inactivating mutation is a deletion of the coding sequence of the ICP4 (one or both copies), ICP22, and/or UL41 genes. In some embodiments, the recombinant herpes simplex virus genome further comprises an inactivating mutation in the ICP0 (one or both copies), ICP27, ICP47, and/or UL55 genes.

[0104] In some embodiments, the recombinant herpes simplex virus genome comprises an inactivating mutation in the ICP22 gene. In some embodiments, the recombinant herpes simplex virus genome comprises an inactivating mutation in the ICP22 gene, and further comprises an inactivating mutation in the ICP0 (one or both copies), ICP4 (one or both copies), ICP27, ICP47, UL41, and/or UL55 genes. In some embodiments, the recombinant herpes simplex virus genome comprises an inactivating mutation in the ICP22 gene, and an inactivating mutation UL41 gene. In some embodiments, the inactivating mutation is a deletion of the coding sequence of the ICP22 and/or UL41 genes. In some embodiments, the recombinant herpes simplex virus genome further comprises an inactivating mutation in the ICP0 (one or both copies), ICP4 (one or both copies), ICP27, ICP47, and/or UL55 genes.

[0105] In some embodiments, the recombinant herpes simplex virus genome comprises an inactivating mutation in the ICP27 gene. In some embodiments, the recombinant herpes simplex virus genome comprises an inactivating mutation in the ICP27 gene, and further comprises an inactivating mutation in the ICP0 (one or both copies), ICP4 (one or both copies), ICP22, ICP47, UL41, and/or UL55 genes. In some embodiments, the inactivating mutation is a deletion of the coding sequence of the ICP27 gene.

[0106] In some embodiments, the recombinant herpes simplex virus genome comprises an inactivating mutation in the ICP47 gene. In some embodiments, the recombinant herpes simplex virus genome comprises an inactivating mutation in the ICP47 gene, and further comprises an inactivating mutation in the ICP0 (one or both copies), ICP4 (one or both copies), ICP22, ICP27, UL41, and/or UL55 genes. In some embodiments, the inactivating mutation is a deletion of the coding sequence of the ICP47 gene.

[0107] In some embodiments, the recombinant herpes simplex virus genome comprises an inactivating mutation in the UL41 gene. In some embodiments, the recombinant herpes simplex virus genome comprises an inactivating mutation in the UL41 gene, and further comprises an inactivating mutation in the ICP0 (one or both copies), ICP4 (one or both copies), ICP22, ICP27, ICP47, and/or UL55 genes. In some embodiments, the inactivating mutation is a deletion of the coding sequence of the UL41 gene.

[0108] In some embodiments, the recombinant herpes simplex virus genome comprises an inactivating mutation in the UL55 gene. In some embodiments, the recombinant herpes simplex virus genome comprises an inactivating mutation in the UL55 gene, and further comprises an inactivating mutation in the ICP0 (one or both copies), ICP4 (one or both copies), ICP22, ICP27, ICP47, and/or UL41 genes. In some embodiments, the inactivating mutation is a deletion of the coding sequence of the UL55 gene.

[0109] In some embodiments, the recombinant herpes simplex virus genome comprises an inactivating mutation in (e.g., a deletion of) the internal repeat (Joint) region comprising the internal repeat long (IRL) and internal repeat short (IRs) regions. In some embodiments, inactivation (e.g., deletion) of the Joint region eliminates one copy each of the ICP4 and ICP0 genes. In some embodiments, inactivation (e.g., deletion) of the Joint region further inactivates (e.g., deletes) the promoter for the ICP22 and ICP47 genes. If desired, expression of one or both of these genes can be restored by insertion of an immediate early promoter into the recombinant herpes simplex virus genome (see e.g., Hill et al. (1995). Nature 375 (6530): 411-415; Goldsmith et al. (1998). J Exp Med 187 (3): 341-348). Without wishing to be bound by theory, it is believed that inactivating (e.g., deleting) the Joint region may contribute to the stability of the recombinant herpes simplex virus genome and/or allow for the recombinant herpes simplex virus genome to accommodate more and/or larger transgenes.

[0110] In some embodiments, the recombinant herpes simplex virus genome comprises an inactivating mutation in the ICP4 (one or both copies), ICP22, and ICP27 genes. In some embodiments, the recombinant herpes simplex virus genome comprises an inactivating mutation in the ICP4 (one or both copies), ICP27, and UL55 genes. In some embodiments, the recombinant herpes simplex virus genome comprises an inactivating mutation in the ICP4 (one or both copies), ICP22, ICP27, ICP47, and UL55 genes. In some embodiments, the inactivating mutation in the ICP4 (one or both copies), ICP27, and/or UL55 genes is a deletion of the coding sequence of the ICP4 (one or both copies), ICP27, and/or UL55 genes. In some embodiments, the inactivating mutation in the ICP22 and ICP47 genes is a deletion in the promoter region of the ICP22 and ICP47 genes (e.g., the ICP22 and ICP47 coding sequences are intact but are not transcriptionally active). In some embodiments, the recombinant herpes simplex virus genome comprises a deletion in the coding sequence of the ICP4 (one or both copies), ICP27, and UL55 genes, and a deletion in the promoter region of the ICP22 and ICP47 genes. In some embodiments, the recombinant herpes simplex virus genome further comprises an inactivating mutation in the ICP0 (one or both copies) and/or UL41 genes.

[0111] In some embodiments, the recombinant herpes simplex virus genome comprises an inactivating mutation in the ICP0 (one or both copies) gene. In some embodiments, the recombinant herpes simplex virus genome comprises an inactivating mutation in the ICP0 (one or both copies) and ICP4 (one or both copies) genes. In some embodiments, the recombinant herpes simplex virus genome comprises an inactivating mutation in the ICP0 (one or both copies), ICP4 (one or both copies), and ICP22 genes. In some embodiments, the recombinant herpes simplex virus genome comprises an inactivating mutation in the ICP0 (one or both copies), ICP4 (one or both copies), ICP22, and ICP27 genes. In some embodiments, the recombinant herpes simplex virus genome comprises an inactivating mutation in the ICP0 (one or both copies), ICP4 (one or both copies), ICP22, ICP27 and UL55 genes. In some embodiments, the inactivating mutation in the ICP0 (one or both copies), ICP4 (one or both copies), ICP22, ICP27 and/or UL55 genes comprises a deletion of the coding sequence of the ICP0 (one or both copies), ICP4 (one or both copies), ICP22, ICP27 and/or UL55 genes. In some embodiments, the recombinant herpes simplex virus genome further comprises an inactivating mutation in the ICP47 and/or the UL41 genes.

[0112] In some embodiments, a recombinant herpes simplex virus genome comprises one or more polynucleotides of the present disclosure within one, two, three, four, five, six, seven or more viral gene loci. Examples of suitable viral loci may include, without limitation, the ICP0 (one or both copies), ICP4 (one or both copies), ICP22, ICP27, ICP47, tk, UL41 and UL55 herpes simplex viral gene loci. In some embodiments, a recombinant herpes simplex virus genome comprises one or more polynucleotides of the present disclosure within one or both of the viral ICP4 gene loci (e.g., a recombinant virus comprising a polynucleotide encoding a polypeptide in one or both of the ICP4 loci). In some embodiments, a recombinant herpes simplex virus genome comprises one or more polynucleotides of the present disclosure within the viral ICP22 gene locus (e.g., a recombinant virus comprising a polynucleotide encoding a polypeptide in the ICP22 locus). In some embodiments, a recombinant herpes simplex virus genome comprises one or more polynucleotides of the present disclosure within the viral UL41 gene locus (e.g., a recombinant virus comprising a polynucleotide encoding a polypeptide in the UL41 locus). In some embodiments, a recombinant herpes simplex virus genome comprises one or more polynucleotides of the present disclosure within the viral ICP27 gene locus (e.g., a recombinant virus comprising a polynucleotide encoding a polypeptide in the ICP27 locus). In some embodiments, a recombinant herpes simplex virus genome comprises one or more polynucleotides of the present disclosure within the viral ICP47 gene locus (e.g., a recombinant virus comprising a polynucleotide encoding a polypeptide in the ICP47 locus). In some embodiments, a recombinant herpes simplex virus genome comprises one or more polynucleotides of the present disclosure within the viral UL55 gene locus (e.g., a recombinant virus comprising a polynucleotide encoding a polypeptide in the UL55 locus). In some embodiments, a recombinant herpes simplex virus genome comprises one or more polynucleotides of the present disclosure within the viral tk gene locus (e.g., a recombinant virus comprising a polynucleotide encoding a polypeptide in the tk locus).

[0113] In some embodiments, a recombinant herpes simplex virus genome comprises one or more polynucleotides of the present disclosure within one or both of the viral ICP4 gene loci, and one or more polynucleotides of the present disclosure within the viral ICP22 gene locus (e.g., a recombinant virus comprising a polynucleotide encoding a polypeptide in one or both of the ICP4 loci, and a polynucleotide encoding a polypeptide in the ICP22 locus). In some embodiments, a recombinant herpes simplex virus genome comprises one or more polynucleotides of the present disclosure within one or both of the viral ICP4 gene loci, and one or more polynucleotides of the present disclosure within the viral UL41 gene locus (e.g., a recombinant virus comprising a polynucleotide encoding a polypeptide in one or both of the ICP4 loci, and a polynucleotide encoding a polypeptide in the UL41 locus). In some embodiments, a recombinant herpes simplex virus genome comprises one or more polynucleotides of the present disclosure within the viral ICP22 gene locus, and one or more polynucleotides of the present disclosure within the viral UL41 gene locus (e.g., a recombinant virus comprising a polynucleotide encoding a polypeptide in the ICP22 locus, and a polynucleotide encoding a polypeptide in the UL41 locus). In some embodiments, a recombinant herpes simplex virus genome comprises one or more polynucleotides of the present disclosure within one or both of the viral ICP4 gene loci, one or more polynucleotides of the present disclosure within the viral ICP22 gene locus, and one or more polynucleotides of the present disclosure within the viral UL41 gene locus (e.g., a recombinant virus comprising a polynucleotide encoding a polypeptide in one or both of the ICP4 loci, a polynucleotide encoding a polypeptide in the ICP22 locus, and a polynucleotide encoding a polypeptide in the UL41 locus). In some embodiments, a recombinant herpes simplex virus genome comprises one or more polynucleotides of the present disclosure within one or both of the viral ICP4 gene loci, one or more polynucleotides of the present disclosure within the viral ICP22 gene locus, one or more polynucleotides of the present disclosure within the viral UL41 gene locus, one or more polynucleotides of the present disclosure within the viral ICP27 gene locus, one or more polynucleotides of the present disclosure within the viral ICP47 gene locus, one or more polynucleotides of the present disclosure within the viral tk gene locus, and/or one or more polynucleotides of the present disclosure within the viral UL55 gene locus.

[0114] In some embodiments, the recombinant herpes virus genome (e.g., a recombinant herpes simplex virus genome) has been engineered to decrease or eliminate expression of one or more herpes virus genes (e.g., one or more toxic herpes virus genes), such as one or both copies of the HSV ICP0 gene, one or both copies of the HSV ICP4 gene, the HSV ICP22 gene, the HSV UL41 gene, the HSV ICP27 gene, the HSV ICP47 gene, the HSV tk gene, the HSV UL55 gene, etc. In some embodiments, the recombinant herpes virus genome (e.g., a recombinant herpes simplex virus genome) has been engineered to reduce cytotoxicity of the recombinant genome (e.g., when introduced into a target cell), as compared to a corresponding wild-type herpes virus genome (e.g., a wild-type herpes simplex virus genome). In some embodiments, the target cell is a human cell (primary cells or a cell line derived therefrom). In some embodiments, the target cell is a cell of the eye (primary cells or a cell line derived therefrom). In some embodiments, cytotoxicity (e.g., in a target cell) of the recombinant genome (e.g., a recombinant herpes simplex virus genome) is reduced by at least about 5%, at least about 10%, at least about 15%, at least about 20%, at least about 25%, at least about 30%, at least about 35%, at least about 40%, at least about 45%, at least about 50%, at least about 55%, at least about 60%, at least about 65%, at least about 70%, at least about 75%, at least about 80%, at least about 85%, at least about 90%, at least about 95%, or at least about 99% as compared to a corresponding wild-type herpes virus genome (e.g., measuring the relative cytotoxicity of a recombinant ΔICP4 (one or both copies) herpes simplex virus genome vs. a wild-type herpes simplex virus genome in a target cell; measuring the relative cytotoxicity of a recombinant ΔICP4 (one or both copies)/ΔICP22 herpes simplex virus genome vs. a wild-type herpes simplex virus genome in a target cell, etc.). In some embodiments, cytotoxicity (e.g., in a target cell) of the recombinant herpes genome (e.g., a recombinant herpes simplex virus genome) is reduced by at least about 1.5-fold, at least about 2-fold, at least about 3-fold, at least about 4-fold, at least about 5-fold, at least about 6-fold, at least about 7-fold, at least about 8-fold, at least about 9-fold, at least about 10-fold, at least about 15-fold, at least about 20-fold, at least about 25-fold, at least about 50-fold, at least about 75-fold, at least about 100-fold, at least about 250-fold, at least about 500-fold, at least about 750-fold, at least about 1000-fold, or more as compared to a corresponding wild-type herpes virus genome (e.g., measuring the relative cytotoxicity of a recombinant ΔICP4 (one or both copies) herpes simplex virus genome vs. a wild-type herpes simplex virus genome in a target cell; measuring the relative cytotoxicity of a recombinant ΔICP4 (one or both copies)/ΔICP22 herpes simplex virus genome vs. a wild-type herpes simplex virus genome in a target cell, etc.). Methods of measuring cytotoxicity are known to one of ordinary skill in the art, including, for example, through the use of vital dyes (formazan dyes), protease biomarkers, an MTT assay (or an assay using related tetrazolium salts such as XTT, MTS, water-soluble tetrazolium salts, etc.), measuring ATP content, etc.

[0115] In some embodiments, the recombinant genome (e.g., a recombinant herpes simplex virus genome) has been engineered to reduce its impact on target cell proliferation after exposure of a target cell to the recombinant genome, as compared to a corresponding wild-type genome (e.g., a wild-type herpes simplex virus genome). In some embodiments, the target cell is a human cell (primary cells or a cell line derived therefrom). In some embodiments, the target cell is a cell of the eye (primary cells or a cell line derived therefrom). In some embodiments, target cell proliferation after exposure to the recombinant genome is at least about 5%, at least about 10%, at least about 15%, at least about 20%, at least about 25%, at least about 30%, at least about 35%, at least about 40%, at least about 45%, at least about 50%, at least about 55%, at least about 60%, at least about 65%, at least about 70%, at least about 75%, at least about 80%, at least about 85%, at least about 90%, at least about 95%, or at least about 99% faster as compared to target cell proliferation after exposure to a corresponding wild-type genome (e.g., measuring the relative cellular proliferation after exposure to a recombinant ΔICP4 (one or both copies) herpes simplex virus genome vs. cellular proliferation after exposure to a wild-type herpes simplex virus genome in target cells; measuring the relative cellular proliferation after exposure to a recombinant ΔICP4 (one or both copies)/ΔICP22 herpes simplex virus genome vs. cellular proliferation after exposure to a wild-type herpes simplex virus genome in target cells, etc.). In some embodiments, target cell proliferation after exposure to the recombinant genome is at least about 1.5-fold, at least about 2-fold, at least about 3-fold, at least about 4-fold, at least about 5-fold, at least about 6-fold, at least about 7-fold, at least about 8-fold, at least about 9-fold, at least about 10-fold, at least about 15-fold, at least about 20-fold, at least about 25-fold, at least about 50-fold, at least about 75-fold, at least about 100-fold, at least about 250-fold, at least about 500-fold, at least about 750-fold, or at least about 1000-fold faster as compared to target cell proliferation after exposure to a corresponding wild-type genome (e.g., measuring the relative cellular proliferation after exposure to a recombinant ΔICP4 (one or both copies) herpes simplex virus genome vs. cellular proliferation after exposure to a wild-type herpes simplex virus genome in target cells; measuring the relative cellular proliferation after exposure to a recombinant ΔICP4 (one or both copies)/ΔICP22 herpes simplex virus genome vs. cellular proliferation after exposure to a wild-type herpes simplex virus genome in target cells, etc.). Methods of measuring cellular proliferation are known to one of ordinary skill in the art, including, for example, through the use of a Ki67 cell proliferation assay, a BrdU cell proliferation assay, etc.

[0116] A vector (e.g., herpes viral vector) may include one or more polynucleotides of the present disclosure in a form suitable for expression of the polynucleotide in a host cell. Vectors may include one or more regulatory sequences operatively linked to the polynucleotide to be expressed (e.g., as described above).

[0117] In some embodiments, the present disclosure relates to one or more heterologous polynucleotides (e.g., a bacterial artificial chromosome (BAC)) comprising any of the recombinant nucleic acids described herein.

[0118] In some embodiments, a recombinant nucleic acid (e.g., a recombinant herpes simplex virus genome) of the present disclosure comprises one or more of the polynucleotides described herein inserted in any orientation in the recombinant nucleic acid. If the recombinant nucleic acid comprises two or more polynucleotides described herein (e.g., two or more, three or more, etc.), the polynucleotides may be inserted in the same orientation or opposite orientations to one another. Without wishing to be bound be theory, incorporating two polynucleotides (e.g., two transgenes) into a recombinant nucleic acid (e.g., a vector) in an antisense orientation may help to avoid read-through and ensure proper expression of each polynucleotide.

[0119] In some embodiments, a recombinant nucleic of the present disclosure does not comprise a polynucleotide encoding a Collagen alpha-1 (VII) chain polypeptide (COL7). In some embodiments, a recombinant nucleic of the present disclosure does not comprise a polynucleotide encoding a Lysyl hydroxylase 3 polypeptide (LH3). In some embodiments, a recombinant nucleic of the present disclosure does not comprise a polynucleotide encoding a Keratin type I cytoskeletal 17 polypeptide (KRT17). In some embodiments, a recombinant nucleic of the present disclosure does not comprise a polynucleotide encoding a transglutaminase (TGM) polypeptide (e.g., a human transglutaminase polypeptide such as a human TGM1 polypeptide and/or a human TGM5 polypeptide). In some embodiments, a recombinant nucleic of the present disclosure does not comprise a polynucleotide encoding a cosmetic protein (e.g., collagen proteins, fibronectins, elastins, lumicans, vitronectins/vitronectin receptors, laminins, neuromodulators, fibrillins, additional dermal extracellular matrix proteins, etc.). In some embodiments, a recombinant nucleic of the present disclosure does not comprise a polynucleotide encoding an antibody (e.g., a full-length antibody, an antibody fragment, etc.). In some embodiments, a recombinant nucleic of the present disclosure does not comprise a polynucleotide encoding a Serine Protease Inhibitor Kazal-type (SPINK) polypeptide (e.g., a human SPINK polypeptide, such as a SPINK5 polypeptide). In some embodiments, a recombinant nucleic of the present disclosure does not comprise a polynucleotide encoding a filaggrin or filaggrin 2 polypeptide (e.g., a human filaggrin or filaggrin 2 polypeptide). In some embodiments, a recombinant nucleic of the present disclosure does not comprise a polynucleotide encoding a Cystic Fibrosis Transmembrane Conductance Regulator (CFTR) polypeptide (e.g., a human CFTR polypeptide). In some embodiments, a recombinant nucleic of the present disclosure does not comprise a polynucleotide encoding an ichthyosis-associated polypeptide (e.g., an ATP-binding cassette sub-family A member 12 polypeptide, a 1-acylglycerol-3-phosphate O-acyltransferase ABHD5 polypeptide, an Aldehyde dehydrogenase family 3 member A2 polypeptide, an Arachidonate 12-lipoxygenase 12R-type polypeptide, a Hydroperoxide isomerase ALOXE3 polypeptide, an AP-1 complex subunit sigma-1A polypeptide, an Arylsulfatase E polypeptide, a Caspase-14 polypeptide, a Corneodesmosin polypeptide, a Ceramide synthase 3 polypeptide, a Carbohydrate sulfotransferase 8 polypeptide, a Claudin-1 polypeptide, a Cystatin-A polypeptide, a Cytochrome P450 4F22 polypeptide, a 3-beta-hydroxysteroid-Delta (8), Delta (7)-isomerase polypeptide, an Elongation of very long chain fatty acids protein 4 polypeptide, a Filaggrin polypeptide, a Filaggrin 2 polypeptide, a Gap junction beta-2 polypeptide, a Gap junction beta-3 polypeptide, a Gap junction beta-4 polypeptide, a Gap junction beta-6 polypeptide, a 3-ketodihydrosphingosine reductase polypeptide, a Keratin, type II cytoskeletal 1 polypeptide, a Keratin, type II cytoskeletal 2 epidermal polypeptide, a Keratin, type I cytoskeletal 9 polypeptide, a Keratin, type I cytoskeletal 10 polypeptide, a Lipase member N polypeptide, a Loricrin polypeptide, a Membrane-bound transcription factor site-2 protease polypeptide, a Magnesium transporter NIPA4 polypeptide, a Sterol-4-alpha-carboxylate 3-dehydrogenase, decarboxylating polypeptide, a Peroxisomal targeting signal 2 receptor polypeptide, a D-3-phosphoglycerate dehydrogenase polypeptide, a Phytanoyl-CoA dioxygenase, peroxisomal polypeptide, Patatin-like phospholipase domain-containing protein 1 polypeptide, a Proteasome maturation protein polypeptide, a Phosphoserine aminotransferase polypeptide, a Short-chain dehydrogenase/reductase family 9C member 7 polypeptide, a Serpin B8 polypeptide, a Long-chain fatty acid transport protein 4 polypeptide, a Synaptosomal-associated protein 29 polypeptide, a Suppressor of tumorigenicity 14 protein polypeptide, a Steryl-sulfatase polypeptide, a Vacuolar protein sorting-associated protein 33B polypeptide, and a CAAX prenyl protease 1 homolog polypeptide). In some embodiments, a recombinant nucleic of the present disclosure does not comprise a polynucleotide encoding a Collagen alpha-1 (VII) chain polypeptide, a Lysyl hydroxylase 3 polypeptide, a Keratin type I cytoskeletal 17 polypeptide, and/or any chimeric polypeptides thereof. In some embodiments, a recombinant nucleic of the present disclosure does not comprise a polynucleotide encoding a Collagen alpha-1 (VII) chain polypeptide, a Lysyl hydroxylase 3 polypeptide, a Keratin type I cytoskeletal 17 polypeptide, a transglutaminase (TGM) polypeptide, a filaggrin polypeptide, a cosmetic protein, an antibody, a SPINK polypeptide, a CFTR polypeptide, an ichthyosis-associated polypeptide, an Alpha-1-antitrypsin polypeptide, a Sodium-dependent phosphate transport protein 2B polypeptide, a Dynein heavy chain 5 axonemal polypeptide, a Dynein heavy chain 11 axonemal polypeptide, a Coiled-coil domain-containing protein 39 polypeptide, a Dynein intermediate chain 1 axonemal polypeptide, a Coiled-coil domain-containing protein 40 polypeptide, a Coiled-coil domain containing protein 103 polypeptide, a Sperm-associated antigen 1 polypeptide, a Zinc finger MYND domain-containing protein 10 polypeptide, an Armadillo repeat containing protein 4 polypeptide, a Coiled-coil domain-containing protein 151 polypeptide, a Dynein intermediate chain 2 axonemal polypeptide, a Radial spoke head 1 homolog polypeptide, a Coiled-coil domain-containing protein 114 polypeptide, a Radial spoke head protein 4 homolog A polypeptide, a Dynein assembly factor 1 axonemal polypeptide, a Dynein assembly factor 2 axonemal polypeptide, a Leucine-rich repeat-containing protein 6 polypeptide, a Pulmonary surfactant-associated protein B polypeptide, a Pulmonary surfactant-associated protein C polypeptide, a Homeobox protein Nkx-2.1 polypeptide, an ATP-binding cassette sub-family A member 3 polypeptide, a Cytokine receptor common subunit beta polypeptide, a Granulocyte-macrophage colony-stimulating factor receptor subunit alpha polypeptide, a Bone morphogenetic protein receptor type-2 polypeptide, a Sarcoplasmic/endoplasmic reticulum calcium ATPase 2 polypeptide, a serine/threonine-protein kinase receptor R3 polypeptide, an Endoglin polypeptide, a Mothers against decapentaplegic homolog 9 polypeptide, a Caveolin-1 polypeptide, a Potassium channel subfamily K member 3 polypeptide, an elF-2-alpha kinase GCN2 polypeptide, a Pulmonary surfactant-associated protein A2 polypeptide, a Telomerase reverse transcriptase polypeptide, a Dyskerin polypeptide, a Regulator of telomere elongation helicase 1 polypeptide, a Poly(A)-specific ribonuclease PARN polypeptide, a TERF1-interacting nuclear factor 2 polypeptide, an H/ACA ribonucleoprotein complex non-core subunit NAF1 polypeptide, a Mucin-5B polypeptide, a Desmoplakin polypeptide, a CST complex subunit STN1 polypeptide, a Dipeptidyl peptidase 9 polypeptide, and/or any chimeric polypeptides thereof.

[0120] In some embodiments, a recombinant nucleic acid of the present disclosure does not comprise a polynucleotide encoding an immunomodulatory polypeptide. In some embodiments, a recombinant nucleic acid of the present disclosure does not comprise a polynucleotide encoding a cytokine polypeptide and/or a chemokine polypeptide. In some embodiments, a recombinant nucleic acid of the present disclosure does not comprise a polynucleotide encoding a cytokine polypeptide. In some embodiments, a recombinant nucleic acid of the present disclosure does not comprise a polynucleotide encoding an IL-1 polypeptide, an IL-2 polypeptide, an IL-7 polypeptide, an IL-12 polypeptide, an IL-13 polypeptide, an IL-15 polypeptide, an IL-17 polypeptide, an IL-18 polypeptide, an IL-28 polypeptide, an IL-32 polypeptide, an IL-33 polypeptide, an IL-34 polypeptide, a TNFα polypeptide, an IFNγ polypeptide, a G-CSF polypeptide, a GM-CSF polypeptide, and/or any chimeric polypeptides thereof.

[0121] In some embodiments, a recombinant nucleic acid of the present disclosure does not comprise a polynucleotide encoding a chemokine polypeptide. In some embodiments, a recombinant nucleic acid of the present disclosure does not comprise a polynucleotide encoding a CXCL1 polypeptide, a CXCL2 polypeptide, a CXCL8 polypeptide, a CXCL9 polypeptide, a CXCL11 polypeptide, a CXCL16 polypeptide, a CCL2 polypeptide, a CCL3 polypeptide, a CCL4 polypeptide, a CCL5 polypeptide, a CCL11 polypeptide, and/or any chimeric polypeptides thereof.

### IV. Viruses

[0122] Certain aspects of the present disclosure relate to viruses comprising any of the polynucleotides and/or recombinant nucleic acids described herein. In some embodiments, the virus is capable of infecting one or more target cells of a subject (e.g., a human). In some embodiments, the virus is suitable for delivering the polynucleotides and/or recombinant nucleic acids into one or more target cells of a subject (e.g., a human). In some embodiments, the one or more target cells are human cells. In some embodiments, the one or more target cells are one or more cells of the eye (e.g., anterior chamber; posterior chamber; ciliary body; corneal epithelial cell; rod cell; cone cell; photoreceptor; retinal pigment epithelial cell; retinal ganglion cell; bipolar cell; horizontal cell; muller cell; amacrine cell; etc.).

[0123] Any suitable virus known in the art may be used, including, for example, adenovirus, adeno-associated virus, retrovirus, lentivirus, sendai virus, papillomavirus, herpes virus (e.g., a herpes simplex virus), vaccinia virus, and/or any hybrid or derivative viruses thereof. In some embodiments, the virus is attenuated. In some embodiments, the virus is replication competent. In some embodiments, the virus is replication defective. In some embodiments, the virus is not oncolytic. In some embodiments, the virus has been modified to alter its tissue tropism relative to the tissue tropism of a corresponding unmodified, wild-type virus. In some embodiments, the virus has reduced cytotoxicity (e.g., in a target cell) as compared to a corresponding wild-type virus. Methods of producing a virus comprising recombinant nucleic acids are well known to one of ordinary skill in the art.

[0124] In some embodiments, the virus is a member of the Herpesviridae family of DNA viruses, including, for example, a herpes simplex virus, a varicella zoster virus, a human cytomegalovirus, a herpesvirus 6A, a herpesvirus 6B, a herpesvirus 7, an Epstein-Barr virus, and a Kaposi's sarcoma-associated herpesvirus, etc. In some embodiments, the herpes virus is attenuated. In some embodiments, the herpes virus is replication defective. In some embodiments, the herpes virus is replication competent. In some embodiments, the herpes virus has been engineered to reduce or eliminate expression of one or more herpes virus genes (e.g., one or more toxic herpes virus genes). In some embodiments, the herpes virus has reduced cytotoxicity as compared to a corresponding wild-type herpes virus. In some embodiments, the herpes virus is not oncolytic.

[0125] In some embodiments, the virus is a herpes simplex virus. Herpes simplex viruses comprising recombinant nucleic acids may be produced by a process disclosed, for example, in WO2015/009952, WO2017/176336, WO2019/200163, and/or WO2019/210219. In some embodiments, the herpes simplex virus is attenuated. In some embodiments, the herpes simplex virus is replication defective. In some embodiments, the herpes simplex virus is replication competent. In some embodiments, the herpes simplex virus has been engineered to reduce or eliminate expression of one or more herpes simplex virus genes (e.g., one or more toxic herpes simplex virus genes). In some embodiments, the herpes simplex virus has reduced cytotoxicity as compared to a corresponding wild-type herpes simplex virus. In some embodiments, the herpes simplex virus is not oncolytic. In some embodiments, the herpes simplex virus is an HSV-1, an HSV-2, or any derivatives thereof. In some embodiments, the herpes simplex virus is an HSV-1 virus. In some embodiments, the HSV-1 is attenuated. In some embodiments, the HSV-1 is replication defective. In some embodiments, the HSV-1 is replication competent. In some embodiments, the HSV-1 has been engineered to reduce or eliminate expression of one or more HSV-1 genes (e.g., one or more toxic HSV-1 genes). In some embodiments, the HSV-1 has reduced cytotoxicity as compared to a corresponding wild-type HSV-1. In some embodiments, the HSV-1 is not oncolytic.

[0126] In some embodiments, the herpes simplex virus has been modified to alter its tissue tropism relative to the tissue tropism of an unmodified, wild-type herpes simplex virus. In some embodiments, the herpes simplex virus comprises a modified envelope. In some embodiments, the modified envelope comprises one or more (e.g., one or more, two or more, three or more, four or more, etc.) mutant herpes simplex virus glycoproteins. Examples of herpes simplex virus glycoproteins may include, but are not limited to, the glycoproteins gB, gC, gD, gH, and gL. In some embodiments, the modified envelope alters the herpes simplex virus tissue tropism relative to a wild-type herpes simplex virus.

[0127] In some embodiments, the transduction efficiency (in vitro and/or in vivo) of a virus of the present disclosure (e.g., a herpes virus such as a herpes simplex virus) for one or more target cells (e.g., one or more cells of the eye) is at least about 25%. For example, the transduction efficiency of the virus for one or more target cells may be at least about 25%, at least about 30%, at least about 35%, at least about 40%, at least about 45%, at least about 50%, at least about 55%, at least about 60%, at least about 65%, at least about 70%, at least about 75%, at least about 80%, at least about 85%, at least about 90%, at least about 95%, at least about 99%, at least about 99.5%, or more. In some embodiments, the virus is a herpes simplex virus and the transduction efficiency of the virus for one or more target cells (e.g., one or more cells of the eye) is about 85% to about 100%. In some embodiments, the virus is a herpes simplex virus and the transduction efficiency of the virus for one or more target cells (e.g., one or more cells of the eye) is at least about 85%, at least about 86%, at least about 87%, at least about 88%, at least about 89%, at least about 90%, at least about 91%, at least about 92%, at least about 93%, at least about 94%, at least about 95%, at least about 96%, at least about 97%, at least about 98%, at least about 99%, or 100%. Methods of measuring viral transduction efficiency in vitro or in vivo are well known to one of ordinary skill in the art, including, for example, qPCR analysis, deep sequencing, western blotting, fluorometric analysis (such as fluorescent in situ hybridization (FISH), fluorescent reporter gene expression, immunofluorescence, FACS), etc.

[0128] In some embodiments, provided herein are recombinant viruses, which may or may not be pseudotyped, that produce one or more therapeutic polypeptides for the treatment of an eye condition or disease. In some embodiments, the one or more therapeutic polypeptides produced by the recombinant viruses described herein mediate or enhance a treatment of an eye condition or disease. The present disclosure further provides therapeutic compositions comprising the recombinant viruses and methods of use in the treatment of an eye condition or disease.

### V. Pharmaceutical Compositions and Formulations

[0129] Certain aspects of the present disclosure relate to pharmaceutical compositions or formulations comprising any of the recombinant nucleic acids (e.g., a recombinant herpes virus genome) and/or viruses (e.g., a herpes virus comprising a recombinant genome) described herein (such as a herpes simplex virus comprising a recombinant herpes simplex virus genome), and a pharmaceutically acceptable excipient or carrier.

[0130] In some embodiments, the pharmaceutical composition or formulation comprises any one or more of the viruses (e.g., herpes viruses) described herein. In some embodiments, the pharmaceutical composition or formulation comprises from about 10⁴ to about 10¹² plaque forming units (PFU)/ml of the virus. For example, the pharmaceutical composition or formulation may comprise from about 10⁴ to about 10¹², about 10⁵ to about 10¹², about 10⁶ to about 10¹², about 10⁷ to about 10¹², about 10⁸ to about 10¹², about 10⁹ to about 10¹², about 10¹⁰ to about 10¹², about 10¹¹ to about 10¹², about 10⁴ to about 10¹¹, about 10⁵ to about 10¹¹, about 10⁶ to about 10¹¹, about 10⁷ to about 10¹¹, about 10⁸ to about 10¹¹, about 10⁹ to about 10¹¹, about 10¹⁰ to about 10¹¹, about 10⁴ to about 10¹⁰, about 10⁵ to about 10¹⁰, about 10⁶ to about 10¹⁰, about 10⁷ to about 10¹⁰, about 10⁸ to about 10¹⁰, about 10⁹ to about 10¹⁰, about 10⁴ to about 10⁹, about 10⁵ to about 10⁹, about 10⁶ to about 10⁹, about 10⁷ to about 10⁹, about 10⁸ to about 10⁹, about 10⁴ to about 10⁸, about 10⁵ to about 10⁸, about 10⁶ to about 108, about 10⁷ to about 10⁸, about 10⁴ to about 10⁷, about 10⁵ to about 10⁷, about 10⁶ to about 10⁷, about 10⁴ to about 10⁶, about 10⁵ to about 10⁶, or about 10⁴ to about 10⁵ PFU/mL of the virus. In some embodiments, the pharmaceutical composition or formulation comprises about 10⁴, about 10⁵, about 10⁶, about 10⁷, about 10⁸, about 10⁹, about 10¹⁰, about 10¹¹, or about 10¹² PFU/mL of the virus.

[0131] Pharmaceutical compositions and formulations can be prepared by mixing the active ingredient(s) (such as a recombinant nucleic acid and/or a virus) having the desired degree of purity with one or more pharmaceutically acceptable carriers or excipients. Pharmaceutically acceptable carriers or excipients are generally nontoxic to recipients at the dosages and concentrations employed, and may include, but are not limited to: buffers (such as phosphate, citrate, acetate, and other organic acids); antioxidants (such as ascorbic acid and methionine); preservatives (such as octadecyldimethylbenzyl ammonium chloride, benzalkonium chloride, benzethonium chloride, phenol, butyl or benzyl alcohol, alkyl parabens, catechol, resorcinol, cyclohexanol, 3-pentanol, and m-cresol); amino acids (such as glycine, glutamine, asparagine, histidine, arginine, or lysine); low molecular weight (less than about 10 residues) polypeptides; proteins (such as serum albumin, gelatin, or immunoglobulins); polyols (such as glycerol, e.g., formulations including 1%, 2%, 3%, 4%, 5%, 6%, 7%, 8%, 9%, 10%, 11%, 12%, 13%, 14%, 15%, etc. glycerol); hydrophilic polymers (such as polyvinylpyrrolidone); monosaccharides, disaccharides, and other carbohydrates (including glucose, mannose, or dextrins); chelating agents (such as EDTA); sugars (such as sucrose, mannitol, trehalose, or sorbitol); salt-forming counter-ions (such as sodium); metal complexes (such as Zn-protein complexes); and/or non-ionic surfactants (such as polyethylene glycol (PEG)). A thorough discussion of pharmaceutically acceptable carriers is available in REMINGTON'S PHARMACEUTICAL SCIENCES (Mack Pub. Co., N.J. 1991).

[0132] In some embodiments, the pharmaceutical composition or formulation is suitable for an eye drop, an ointment, a paste, a cream, a suspension, an emulsion, a fatty ointment, a gel, a bioadhesive gel, a powder, a lotion, a solution, and/or a spray.

[0133] In some embodiments, the pharmaceutical composition or formulation comprises one or more lipid (e.g., cationic lipid) carriers. In some embodiments, the pharmaceutical composition or formulation comprises one or more nanoparticle carriers. Nanoparticles are submicron (less than about 1000 nm) sized drug delivery vehicles that can carry encapsulated drugs (such as synthetic small molecules, proteins, peptides, cells, viruses, and nucleic acid-based biotherapeutics) for rapid or controlled release. A variety of molecules (e.g., proteins, peptides, recombinant nucleic acids, etc.) can be efficiently encapsulated in nanoparticles using processes well known in the art. In some embodiments, a molecule “encapsulated” in a nanoparticle may refer to a molecule (such as a virus) that is contained within the nanoparticle or attached to and/or associated with the surface of the nanoparticle, or any combination thereof. Nanoparticles for use in the compositions or formulations described herein may be any type of biocompatible nanoparticle known in the art, including, for example, nanoparticles comprising poly(lactic acid), poly(glycolic acid), PLGA, PLA, PGA, and any combinations thereof (see e.g., Vauthier et al. Adv Drug Del Rev. (2003) 55:519-48; US2007/0148074; US2007/0092575; US2006/0246139; U.S. Pat. Nos. 5,753,234; 7,081,483; and WO2006/052285).

[0134] In some embodiments, the pharmaceutically acceptable carrier or excipient may be adapted for or suitable for any administration route known in the art, including, for example, ocular, subretinal, intraocular, intravitreal, topical, subcutaneous, subconjunctival, subtenon, subtenon capsule, intracameral, retrobulbar, systemic, parenteral, periocular, juxtascleral, anterior juxtascleral, posterior juxtascleral, oral, peribulbar, or suprachoroidal administration.

[0135] In some embodiments, the pharmaceutically acceptable carrier or excipient may be adapted for or suitable for any administration route known in the art, including, for example, intravenous, intramuscular, subcutaneous, cutaneous, oral, intranasal, intratracheal, sublingual, buccal, topical, transdermal, intradermal, intraperitoneal, intraorbital, intravitreal, subretinal, suprachoroidal, transmucosal, intraarticular, by implantation, by inhalation, intrathecal, intraventricular, and/or intranasal administration.

[0136] In some embodiments, the pharmaceutical composition or formulation is adapted for or suitable for any administration route known in the art, including, for example, intravenous, intramuscular, subcutaneous, cutaneous, oral, intranasal, intratracheal, sublingual, buccal, topical, transdermal, intradermal, intraperitoneal, intraorbital, intravitreal, subretinal, suprachoroidal, transmucosal, intraarticular, by implantation, by inhalation, intrathecal, intraventricular, or intranasal administration.

[0137] In some embodiments, the pharmaceutical composition or formulation further comprises one or more additional components. Examples of additional components may include, but are not limited to, binding agents (e.g., pregelatinized maize starch, polyvinylpyrrolidone or hydroxypropyl methylcellulose, etc.); fillers (e.g., lactose and other sugars, microcrystalline cellulose, pectin, gelatin, calcium sulfate, ethyl cellulose, polyacrylates or calcium hydrogen phosphate, etc.); lubricants (e.g., magnesium stearate, talc, silica, colloidal silicon dioxide, stearic acid, metallic stearates, hydrogenated vegetable oils, corn starch, polyethylene glycols, sodium benzoate, sodium acetate, etc.); disintegrants (e.g., starch, sodium starch glycolate, etc.); wetting agents (e.g., sodium lauryl sulphate, etc.); salt solutions; alcohols; polyethylene glycols; gelatin; lactose; amylase; magnesium stearate; talc; silicic acid; viscous paraffin; hydroxymethylcellulose; polyvinylpyrrolidone; sweetenings; flavorings; perfuming agents; colorants; moisturizers; sunscreens; antibacterial agents; agents able to stabilize polynucleotides or prevent their degradation, and the like. In some embodiments, the pharmaceutical composition or formulation comprises a methylcellulose gel (e.g., hydroxypropyl methylcellulose, carboxy methylcellulose, etc.). In some embodiments, the pharmaceutical composition or formulation comprises a phosphate buffer. In some embodiments, the pharmaceutical composition or formulation comprises glycerol (e.g., at about 1%, about 2%, about 3%, about 4%, about 5%, about 6%, about 7%, about 8%, about 9%, about 10%, about 11%, about 12%, about 13%, about 14%, about 15%, etc.). In some embodiments, the pharmaceutical composition or formulation comprises a phosphate buffer and glycerol.

[0138] Pharmaceutical compositions and formulations to be used for in vivo administration are generally sterile. Sterility may be readily accomplished, e.g., by filtration through sterile filtration membranes.

[0139] In some embodiments, any of the recombinant nucleic acids, viruses, and/or pharmaceutical compositions or formulations described herein may be used to deliver one or more polynucleotides encoding a polypeptide into one or more cells of a subject (e.g., one or more cells of the eye of the subject). In some embodiments, the subject suffers from an eye condition or disease. In some embodiments, any of the recombinant nucleic acids, viruses, and/or pharmaceutical compositions or formulations described herein may be used in the treatment of retinitis pigmentosa, recessive retinitis pigmentosa, severe recessive retinitis pigmentosa, dominant retinitis pigmentosa, dominant retinitis pigmentosa with choroidal involvement, recessive retinitis pigmentosa with para-arteriolar preservation of the RPE (PPRPE), recessive retinitis pigmentosa with posterior column ataxia (PCARP), recessive retinitis pigmentosa with erythrocytic microcytosis, syndromic recessive retinitis pigmentosa, recessive syndromic disease with retinitis pigmentosa, non-syndromic recessive retinitis pigmentosa, non-syndromic dominant retinitis pigmentosa, syndromic dominant retinitis pigmentosa, juvenile recessive retinitis pigmentosa, recessive retinitis pigmentosa and mental retardation, recessive retinitis pigmentosa with macular degeneration, severe early-onset recessive retinitis pigmentosa, recessive retinitis pigmentosa and skeletal anomalies, recessive retinitis pigmentosa and skeletal abnormalities, dominant retinitis pigmentosa with sensorineural deafness, recessive retinitis pigmentosa with hearing loss, recessive retinitis pigmentosa with hearing loss and additional disabilities, recessive retinitis pigmentosa with vitreal alterations, early onset with macular coloboma recessive retinitis pigmentosa, X-linked retinitis pigmentosa, recessive X-linked retinitis pigmentosa, dominant X-linked retinitis pigmentosa, severe X-linked retinitis pigmentosa, X-linked retinitis pigmentosa with mental retardation, X-linked retinitis pigmentosa with myopathy, Bardet-Biedl like retinitis pigmentosa, Bardet-Biedl like recessive retinitis pigmentosa, digenic retinitis pigmentosa, digenic retinitis pigmentosa with retinal outer segment membrane protein 1, digenic retinitis pigmentosa with PRPH2, recessive retinitis pigmentosa with early macular involvement, recessive deafness without retinitis pigmentosa, recessive congenital deafness without retinitis pigmentosa, recessive retinitis pigmentosa and recessive ataxia, recessive retinitis pigmentosa and dominant ataxia, mitochondrial retinitis pigmentosa, mitochondrial retinitis pigmentosa with developmental and neurological abnormalities, mitochondrial retinitis pigmentosa with progressive sensorineural hearing loss, mitochondrial retinitis pigmentosa with deafness and neurological abnormalities, Autosomal Dominant Retinitis Pigmentosa, Nonsyndromic Autosomal Dominant Retinitis Pigmentosa, Autosomal Recessive, Retinitis Pigmentosa, Nonsyndromic Autosomal Recessive Retinitis Pigmentosa, Retinal pigment epithelium (RPE), recessive RPE, dominant RPE, recessive RPE degeneration, dominant RPE degeneration, ataxia, recessive ataxia, dominant ataxia, Senior-Loken syndrome, recessive Senior-Loken syndrome, dominant Senior-Loken syndrome, nephronophthisis, recessive nephronophthisis, dominant nephronophthisis, adolescent recessive nephronophthisis, ciliopathy-related recessive nephronophthisis, juvenile nephronophthisis, juvenile recessive nephronophthisis, juvenile dominant nephronophthisis, Usher syndrome, Usher syndrome type I, Usher syndrome type II, Usher syndrome type III, recessive Usher syndrome, atypical recessive Usher syndrome, dominant Usher syndrome, type 2 recessive Usher syndrome, type 2a recessive Usher syndrome, type 3 recessive Usher syndrome, type 3-like recessive Usher syndrome, atypical recessive Usher syndrome, type 1 recessive Usher syndrome, type 1b recessive Usher syndrome, type 1d recessive Usher syndrome, type 1f recessive Usher syndrome, type 1J recessive Usher syndrome, type 1k recessive Usher syndrome, digenic Usher syndrome with CDH23, digenic Usher syndrome with PCDH15, Acadian recessive Usher syndrome, recessive atypical Usher syndrome (USH3-like), Leber congenital amaurosis, recessive Leber congenital amaurosis, dominant Leber congenital amaurosis, de novo Leber congenital amaurosis, dominant Leber congenital amaurosis and pituitary dysfunction, recessive Leber congenital amaurosis with myopathy, recessive Leber congenital amaurosis with severe childhood retinal dystrophy, mitochondrial Leber hereditary optic neuropathy, Leber hereditary optic neuropathy, optic atrophy, recessive optic atrophy, dominant optic atrophy, optic atrophy with ataxia, recessive optic atrophy with ataxia, dominant optic atrophy with ataxia, recessive optic atrophy with ataxia and 3-methylglutaconic aciduria, dominant optic atrophy with cataract, ataxia and areflexia, Kjer type dominant optic atrophy, dominant optic atrophy with sensorineural hearing loss, recessive cerebellar degeneration with optic atrophy, optic atrophy with deadness-dystonia syndrome, X-linked optic atrophy with deadness-dystonia syndrome, retinal dystrophy, recessive retinal dystrophy, dominant retinal dystrophy, inherited retinal dystrophy, early onset recessive retinal dystrophy, recessive syndromic retinal dystrophy, recessive non-syndromic retinal dystrophy, recessive syndromic and non-syndromic retinal dystrophy, recessive optic atrophy and retinal dystrophy, recessive retinal dystrophy and obesity, recessive retinal dystrophy and cerebellar dysplasia, syndromic recessive optic atrophy and retinal dystrophy, dominant retinal dystrophy with iris coloboma, spectrum of ciliopathies including retinal dystrophy, recessive spectrum of ciliopathies including retinal dystrophy, dominant spectrum of ciliopathies including retinal dystrophy, dominant optic atrophy with neuropathy and myopathy, dominant optic atrophy with intellectual disability and developmental delay, syndromic optic atrophy, non-syndromic optic atrophy, recessive non-syndromic optic atrophy, dominant non-syndromic optic atrophy, recessive syndromic optic atrophy, dominant syndromic optic atrophy, Charcot-Marie-Tooth disease, recessive Charcot-Marie-Tooth disease, dominant Charcot-Marie-Tooth disease, benign fleck retina, recessive benign fleck retina, dominant benign fleck retina, syndromic retinopathy, recessive syndromic retinopathy, dominant syndromic retinopathy, Batten disease, recessive Batten disease, dominant Batten disease, recessive Batten disease (ceroid-lipofuscinosis, neuronal 3), juvenile recessive Batten disease (ceroid-lipofuscinosis, neuronal 3), neuronal ceroid lipofuscinosis, recessive neuronal ceroid lipofuscinosis, recessive neuronal ceroid lipofuscinosis 1, dominant neuronal ceroid lipofuscinosis, Stargardt disease, recessive Stargardt disease, dominant Stargardt disease, juvenile Stargardt disease, late onset Stargardt disease, Stargardt-like macular dystrophy, recessive Stargardt-like macular dystrophy, dominant Stargardt-like macular dystrophy, macular dystrophy, recessive macular dystrophy, early onset macular dystrophy, adult onset macular dystrophy, early onset recessive macular dystrophy, adult onset recessive macular dystrophy, early adult onset recessive macular dystrophy, juvenile with hypotrichosis recessive macular dystrophy, dominant macular dystrophy, late onset dominant macular dystrophy, dominant macular dystrophy with lens zonules, bull's-eye dominant macular dystrophy, butterfly-shaped dominant macular dystrophy, age-related dominant macular dystrophy, benign concentric annular dominant macular dystrophy, vitelliform recessive macular dystrophy, vitelliform dominant macular dystrophy, atypical vitelliform dominant macular dystrophy, dominant adult vitelliform macular dystrophy, Stargardt-like dominant macular dystrophy, Stargardt type dominant macular dystrophy, North Carolina dominant macular dystrophy, North Carolina-like dominant macular dystrophy, North Carolina-like with progressive sensorineural hearing loss dominant macular dystrophy, cystoid dominant macular dystrophy, Best type dominant macular dystrophy, occult macular dystrophy, recessive occult macular dystrophy, dominant occult macular dystrophy, age-related familial macular dystrophy, X-linked atrophic macular dystrophy, recessive X-linked atrophic macular dystrophy, dominant X-linked atrophic macular dystrophy, mitochondrial macular pattern dystrophy with type II diabetes and deafness, fundus flavimaculatus, recessive fundus flavimaculatus, dominant fundus flavimaculatus, rod dystrophy, recessive rod dystrophy, dominant rod dystrophy, cone dystrophy, recessive cone dystrophy, dominant cone dystrophy, recessive cone dystrophy with supernormal rod electroretinogram, early onset recessive cone dystrophy, late onset recessive cone dystrophy, cone dystrophy 1, X-linked cone dystrophy 1, cone dystrophy 2, progressive cone dystrophy 2, X-linked progressive cone dystrophy 2, delayed cone adaptation, recessive delayed cone adaptation, dominant delayed cone adaptation, cone-rod dystrophy, recessive cone-rod dystrophy, dominant cone-rod dystrophy, isolated cone-rod dystrophy, progressive cone-rod dystrophy, X-linked cone-rod dystrophy, X-linked progressive cone-rod dystrophy, progressive dominant cone-rod dystrophy, cone-rod dystrophy and amelogenesis imperfecta syndrome, recessive cone-rod dystrophy and amelogenesis imperfecta syndrome, dominant cone-rod dystrophy and amelogenesis imperfecta syndrome, recessive cone-rod dystrophy with inner retinopathy, recessive cone-rod dystrophy with skeletal disease, congenital syndromic nonprogressive recessive cone-rod dystrophy, recessive cone-rod dystrophy with hearing loss, recessive cone-rod dystrophy with psychomotor delay, recessive cone and cone-rod dystrophy, cone-rod synaptic disease, congenital cone-rod synaptic disease, recessive congenital cone-rod synaptic disease, dominant congenital cone-rod synaptic disease, rod-cone dystrophy, recessive rod-cone dystrophy, dominant rod-cone dystrophy, early onset recessive rod-cone dystrophy, non-syndromic recessive rod-cone dystrophy, recessive Newfoundland rod-cone dystrophy, recessive progressive cone dystrophy, Stickler syndrome, dominant Stickler syndrome, recessive Stickler syndrome, dominant Stickler syndrome type I, dominant Stickler syndrome type II, Marshall syndrome, dominant Marshall syndrome, recessive Marshall syndrome, achromatopsia, recessive achromatopsia, dominant achromatopsia, recessive complete achromatopsia, recessive incomplete achromatopsia, macular degeneration, age-related macular degeneration, complex etiology age-related macular degeneration, isolated age-related macular degeneration, wet age-related macular degeneration, dry age-related macular degeneration, drusen, recessive drusen, dominant drusen, early-onset recessive drusen, early-onset dominant drusen, macular drusen, dominant radial macular drusen, pigmented paravenous chorioretinal atrophy, recessive pigmented paravenous chorioretinal atrophy, dominant pigmented paravenous chorioretinal atrophy, progressive Bifocal Chorioretinal Atrophy, Bardet-Biedl syndrome, recessive Bardet-Biedl syndrome, dominant Bardet-Biedl syndrome, recessive Bardet-Biedl syndrome with developmental anomalies, retinal degeneration, recessive retinal degeneration, dominant retinal degeneration, non-syndromic recessive retinal degeneration, Doyne honeycomb retinal degeneration, recessive Doyne honeycomb retinal degeneration, dominant Doyne honeycomb retinal degeneration (Malattia Leventinese), recessive nephronophthisis with retinal degeneration, Alström syndrome, recessive Alström syndrome, dominant Alström syndrome, Joubert syndrome, recessive Joubert syndrome, dominant Joubert syndrome, Jobert syndrome, recessive Jobert syndrome, dominant Jobert syndrome, X-linked Jobert syndrome, vitreoretinal degeneration, recessive vitreoretinal degeneration, dominant vitreoretinal degeneration, snowflake vitreoretinal degeneration, snowflake dominant vitreoretinal degeneration, Oguchi disease, recessive Oguchi disease, dominant Oguchi disease, night blindness, stationary night blindness, congenital recessive congenital stationary night blindness, recessive complete congenital stationary night blindness, dominant congenital stationary night blindness, Nougaret type dominant congenital stationary night blindness, Oguchi type recessive congenital stationary night blindness, Riggs type recessive congenital stationary night blindness, Schubert-Bornschein type recessive congenital stationary night blindness, fundus albipunctatus type recessive congenital stationary night blindness, complete recessive congenital stationary night blindness, X-linked congenital stationary night blindness, incomplete X-linked congenital stationary night blindness, retinal vasculopathy, cerebral leukodystrophy, retinal vasculopathy with cerebral leukodystrophy, recessive retinal vasculopathy with cerebral leukodystrophy, dominant retinal vasculopathy with cerebral leukodystrophy, Aicardi-Goutiere syndrome, Aicardi-Goutiere syndrome 1, recessive Aicardi-Goutiere syndrome 1, dominant Aicardi-utiere syndrome 1, chilblain lupus, recessive chilblain lupus, dominant chilblain lupus, Martinique retinal dystrophy and retinitis pigmentosa, recessive Martinique retinal dystrophy and retinitis pigmentosa, dominant Martinique retinal dystrophy and retinitis pigmentosa, spinocerebellar ataxia, recessive spinocerebellar ataxia, dominant spinocerebellar ataxia, spinocerebellar ataxia with macular dystrophy, spinocerebellar ataxia with retinal degeneration, spinocerebellar ataxia with macular dystrophy or retinal degeneration, recessive spinocerebellar ataxia with macular dystrophy or retinal degeneration, dominant spinocerebellar ataxia with macular dystrophy or retinal degeneration, Wolfram syndrome, recessive Wolfram syndrome, dominant Wolfram syndrome, low frequency sensorineural hearing loss, recessive low frequency sensorineural hearing loss, dominant low frequency sensorineural hearing loss, oculoauricular syndrome, recessive oculoauricular syndrome, dominant oculoauricular syndrome, recessive renal, skeletal and retinal anomalies, recessive abetalipoproteinemia, microcephaly, recessive microcephaly, dominant microcephaly, growth failure and retinopathy recessive microcephaly, Bietti crystalline corneoretinal dystrophy, recessive Bietti crystalline corneoretinal dystrophy, dominant Bietti crystalline corneoretinal dystrophy, Wagner disease, erosive vitreoretinopathy, Wagner disease and erosive vitreoretinopathy, recessive Wagner disease and erosive vitreoretinopathy, dominant Wagner disease and erosive vitreoretinopathy, febrile convulsions, recessive febrile convulsions, dominant febrile convulsions, dominant/recessive febrile convulsions, choroidal dystrophy, recessive choroidal dystrophy, dominant choroidal dystrophy, central areolar choroidal dystrophy, dominant central areolar choroidal dystrophy, recessive central areolar choroidal dystrophy, epiphyseal dysplasia, recessive epiphyseal dysplasia, dominant epiphyseal dysplasia, multiple epiphyseal dysplasia, recessive multiple epiphyseal dysplasia, dominant multiple epiphyseal dysplasia, ichthyosis, recessive ichthyosis, dominant ichthyosis, quadriplegia and retardation recessive ichthyosis, chorioretinal atrophy, bifocal chorioretinal atrophy, progressive bifocal chorioretinal atrophy, recessive progressive bifocal chorioretinal atrophy, dominant progressive bifocal chorioretinal atrophy, Refsum disease, recessive Refsum disease, dominant Refsum disease, adult form recessive Refsum disease, infantile form recessive Refsum disease, retinal-cone dystrophy, recessive retinal-cone dystrophy, dominant retinal-cone dystrophy, retinal-cone dystrophy 1, recessive retinal-cone dystrophy 1, dominant retinal-cone dystrophy 1, tritanopia, recessive tritanopia, dominant tritanopia, mucopolysaccharidosis, recessive mucopolysaccharidosis, dominant mucopolysaccharidosis, achromatopsia Pingelapese, recessive achromatopsia Pingelapese, dominant achromatopsia Pingelapese, Klippel-Feil syndrome, recessive Klippel-Feil syndrome, dominant Klippel-Feil syndrome, microphthalmia, recessive microphthalmia, dominant microphthalmia, limb-girdle muscular dystrophy, recessive limb-girdle muscular dystrophy, dominant limb-girdle muscular dystrophy, short-rib thoracic dysplasia, recessive short-rib thoracic dysplasia, dominant short-rib thoracic dysplasia, polydactyly recessive short-rib thoracic dysplasia, retinal dystrophy recessive short-rib thoracic dysplasia, mental retardation, truncal obesity, retinal dystrophy, and micropenis (MORM) syndrome, recessive MORM syndrome, dominant MORM syndrome, spasticity and retinal degeneration recessive retardation, Cockayne syndrome, recessive Cockayne syndrome, dominant Cockayne syndrome, congenital retinal nonattachment, recessive nonsyndromal congenital retinal nonattachment, dominant nonsyndromal congenital retinal nonattachment, hemolytic anemia, nonspherocytic hemolytic anemia, recessive nonspherocytic hemolytic anemia, dominant nonspherocytic hemolytic anemia, hereditary neuropathy, hereditary neuropathy (Russe type), recessive hereditary neuropathy (Russe type), dominant hereditary neuropathy (Russe type), choroidal sclerosis, recessive choroidal sclerosis, dominant choroidal sclerosis, retinopathy, recessive retinopathy, dominant retinopathy, combined dominant and recessive retinopathy, diffuse dominant retinopathy, variable dominant retinopathy, diffuse and variable dominant retinopathy, microcephaly, recessive microcephaly, dominant microcephaly, lymphedema dominant microcephaly, chorioretinopathy dominant microcephaly, lymphedema and chorioretinopathy dominant microcephaly, chorioretinopathy, recessive chorioretinopathy, dominant chorioretinopathy, chorioretinopathy and microcephaly, recessive chorioretinopathy and microcephaly, dominant chorioretinopathy and microcephaly, renal-coloboma syndrome, recessive renal-coloboma syndrome, dominant renal-coloboma syndrome, non-syndromic deafness, recessive non-syndromic deafness, dominant non-syndromic deafness, gyrate atrophy, recessive gyrate atrophy, dominant gyrate atrophy, gyrate atrophy of the choroid and retina, vitreoretinopathy, exudative vitreoretinopathy, familial exudative vitreoretinopathy, recessive familial exudative vitreoretinopathy, dominant familial exudative vitreoretinopathy, dominant familial exudative vitreoretinopathy and Coats disease, neovascular inflammatory vitreoretinopathy, recessive neovascular inflammatory vitreoretinopathy, dominant neovascular inflammatory vitreoretinopathy, atrophia areata, recessive atrophia areata, dominant atrophia areata, Meckel syndrome, recessive Meckel syndrome, dominant Meckel syndrome, vitreoretinochoroidopathy, recessive vitreoretinochoroidopathy, dominant vitreoretinochoroidopathy, bestrophinopathy, recessive bestrophinopathy, dominant bestrophinopathy, high bone mass trait, recessive high bone mass trait, dominant high bone mass trait, osteoporosis-pseudoglioma syndrome, recessive osteoporosis-pseudoglioma syndrome, dominant osteoporosis-pseudoglioma syndrome, microphthalmos, recessive microphthalmos, dominant microphthalmos, retinal disease syndrome, recessive retinal disease syndrome, dominant retinal disease syndrome, microphthalmos and retinal disease syndrome, recessive microphthalmos and retinal disease syndrome, dominant microphthalmos and retinal disease syndrome, nanophthalmos, recessive nanophthalmos, dominant nanophthalmos, bone dysplasias, recessive bone dysplasias, dominant bone dysplasias, developmental disorders, osteoarthritic diseases and syndromic disorders, cavitary optic disc anomalies, recessive cavitary optic disc anomalies, dominant cavitary optic disc anomalies, fundus albipunctatus, recessive fundus albipunctatus, dominant fundus albipunctatus, mevalonic aciduria, recessive mevalonic aciduria, dominant mevalonic aciduria, hyper-IgD syndrome, recessive hyper-IgD syndrome, dominant hyper-IgD syndrome, spastic paraplegia, recessive spastic paraplegia, dominant spastic paraplegia, neuropathy recessive spastic paraplegia, optic atrophy recessive spastic paraplegia, neuropathy and optic atrophy recessive spastic paraplegia (dementia), recessive dementia, dominant dementia, familial dominant dementia, retinoblastoma, recessive retinoblastoma, dominant retinoblastoma, germline retinoblastoma, somatic retinoblastoma, dominant germline or somatic retinoblastoma, retinoma, benign retinoma, pinealoma, osteogenic sarcoma, rod monochromacy, recessive rod monochromacy, dominant rod monochromacy, achromatopsia, recessive achromatopsia, dominant achromatopsia, rod achromatopsia, rod recessive achromatopsia, rod dominant achromatopsia, recessive rod monochromacy or achromatopsia, pattern dystrophy, recessive pattern dystrophy, dominant pattern dystrophy, S-cone syndrome, enhanced S-cone syndrome (ESC), recessive ESC, dominant ESC, Goldmann-Favre syndrome, recessive Goldmann-Favre syndrome, dominant Goldmann-Favre syndrome, Bothnia dystrophy, recessive Bothnia dystrophy, dominant Bothnia dystrophy, retinitis punctata albescens, recessive retinitis punctata albescens, dominant retinitis punctata albescens, mucolipidosis III gamma, recessive mucolipidosis III gamma, dominant mucolipidosis III gamma, Mainzer-Saldino syndrome, recessive Mainzer-Saldino syndrome, dominant Mainzer-Saldino syndrome, pseudoxanthoma elasticum, recessive pseudoxanthoma elasticum, dominant pseudoxanthoma elasticum, Knobloch syndrome, recessive Knobloch syndrome, dominant Knobloch syndrome, foveal hypoplasia, recessive foveal hypoplasia, dominant foveal hypoplasia, anterior segment dysgenesis, recessive anterior segment dysgenesis, dominant anterior segment dysgenesis, foveal hypoplasia and anterior segment dysgenesis, recessive foveal hypoplasia and anterior segment dysgenesis, dominant foveal hypoplasia and anterior segment dysgenesis, spastic ataxia, recessive spastic ataxia, dominant spastic ataxia, de Grouchy syndrome, Boucher-Neuhauser syndrome, recessive Boucher-Neuhauser syndrome, dominant Boucher-Neuhauser syndrome, Boucher-Neuhauser syndrome with chorioretinal dystrophy, recessive Boucher-Neuhauser syndrome with chorioretinal dystrophy, dominant Boucher-Neuhauser syndrome with chorioretinal dystrophy, hypoprebetalipoproteinemia, acanthocytosis, retinitis pigmentosa, and palladial (HARP), degeneration, recessive HARP degeneration, dominant HARP degeneration, Hallervorden-Spatz syndrome, recessive Hallervorden-Spatz syndrome, dominant Hallervorden-Spatz syndrome, Alagille syndrome, recessive Alagille syndrome, dominant Alagille syndrome, polyneuropathy, hearing loss, ataxia, retinitis pigmentosa and early-onset cataract (PHARC), recessive PHARC, dominant PHARC, recessive syndromic PHARC, Sorsby's fundus dystrophy, recessive Sorsby's fundus dystrophy, dominant Sorsby's fundus dystrophy, vitreoretinal dystrophy, recessive vitreoretinal dystrophy, dominant vitreoretinal dystrophy, optic neuropathy, recessive optic neuropathy, dominant optic neuropathy, late onset dominant optic neuropathy, orofaciodigital syndrome 1, Simpson-Golabi-Behmel syndrome 2, X-linked retinoschisis, X-linked Oregon eye disease, X-linked optic atrophy, retinal dysplasia, recessive retinal dysplasia, dominant retinal dysplasia, X-linked retinal dysplasia, primary X-linked retinal dysplasia, X-linked Norrie disease, Coats disease, X-linked Åland Island eye disease, Autoimmune Inner Ear Disease (AIED), AIED-like disease, choroideremia, X-linked choroideremia, neuropathy, optic atrophy, deafness and retinitis pigmentosa, X-linked neuropathy, optic atrophy, deafness and retinitis pigmentosa, X-linked blue cone monochromacy, X-linked protanomaly and rare macular dystrophy in blue cone monochromacy (BCM), X-linked deuteranomaly and rare macular dystrophy in blue cone monochromacy (BCM), mitochondrial Kearns-Sayre syndrome including retinal pigmentary degeneration, Leigh syndrome, retinopathy, mitochondrial pigmentary retinopathy and sensorineural hearing loss, ocular albinism, oculocutaneous albinism, Neuronal ceroid lipofuscinoses, Zellweger spectrum disorder, Cobalamin C deficiency, blue-cone monochromatism, hereditary red-green color vision defects, tritan and yellow-blue defects, bradyopsia, delayed cone adaptation, Uveitis, Diabetic Retinopathy, Diabetic Macular Edema, Persistent Corneal Epithelial Defect, Neurotrophic Keratitis, Herpes Stromal Keratitis, Chronic Dry Eye, Glaucoma, ocular abrasion, ocular blistering, ocular scarring, vision loss, blindness, corneal blindness, dry eye disease, aqueous deficiency dry eye disease, Sjögren's syndrome-related aqueous deficiency dry eye disease, non-Sjögren's syndrome-related dry eye disease, evaporative dry eye disease, meibomian gland dysfunction, blepharitis, lid margin inflammation, ocular rosacea and atopy, aqueous deficiency and evaporative dry eye disease, Fuchs dystrophy, Fuchs endothelial corneal dystrophy (FECD), Fuchs endothelial dystrophy (FED), panuveitis, diffuse uveitis, total uveitis, cataract, partial cataracts, complete cataracts, stationary cataracts, progressive cataracts, hard cataracts, soft cataracts, nuclear cataracts, nuclear sclerosis cataracts, cortical cataracts, posterior subcapsular cataracts, congenital cataracts, corneal dystrophy, Epithelial and subepithelial dystrophies, Epithelial basement membrane dystrophy, Epithelial recurrent erosion dystrophies (Franceschetti corneal dystrophy, Dystrophia Smolandiensis, and/or Dystrophia Helsinglandica), Subepithelial mucinous corneal dystrophy, Meesmann corneal dystrophy, Lisch epithelial corneal dystrophy, Gelatinous drop-like corneal dystrophy, Bowman Layer dystrophies, Reis-Bücklers corneal dystrophy, Thiel-Behnke corneal dystrophy, Stromal dystrophies-TGFB1 corneal dystrophies, Lattice corneal dystrophy, type 1 variants (III, IIIA, I/IIIA, IV) of lattice corneal dystrophy, Granular corneal dystrophy, type 1, Granular corneal dystrophy, type 2, Stromal dystrophies, Macular corneal dystrophy, Schnyder crystalline corneal dystrophy, Congenital stromal corneal dystrophy, Fleck corneal dystrophy, Posterior amorphous corneal dystrophy, Central cloudy dystrophy of François, Pre-Descemet corneal dystrophy, Endothelial dystrophies, Fuchs' dystrophy, Posterior polymorphous corneal dystrophy, Congenital hereditary endothelial dystrophy, X-linked endothelial corneal dystrophy, Superficial dystrophies, Epithelial basement membrane dystrophy, Meesmann juvenile epithelial corneal dystrophy, Gelatinous drop-like corneal dystrophy, Lisch epithelial corneal dystrophy, Subepithelial mucinous corneal dystrophy, Reis-Bucklers corneal dystrophy, Thiel-Behnke dystrophy, Stromal dystrophies, Lattice corneal dystrophy, Granular corneal dystrophy, Macular corneal dystrophy, Schnyder crystalline corneal dystrophy, Congenital stromal corneal dystrophy, Fleck corneal dystrophy, Posterior dystrophies, Fuchs' dystrophy, Posterior polymorphous corneal dystrophy, Congenital hereditary endothelial dystrophy, keratopathy, band keratopathy, corneal band keratopathy, and/or calcific band keratopathy.

[0140] In some embodiments, the one or more transgenes include a gene expressed in a photoreceptor in a subject.

[0141] In some embodiments, the disease or condition is Stargardt disease. In some embodiments, the one or more symptoms include central vision loss starting in childhood or early adolescence. In some embodiments, the disease or condition is autosomal recessive. In some embodiments, the disease or condition involves one or more mutations in ABCA4. In some embodiments, the disease or condition has a prevalence of about 1 in 10,000. Mutations in ABCA4 also cause cone-rod dystrophy (loss of visual sharpness, photophobia, impaired color vision) that worsens over time and is also autosomal recessive inheritance. In some embodiments, the disease or condition involves one or more mutations in ELOVL4. For instance, Stargardt disease can also less often be caused by mutations in the ELOVL4 gene.

[0142] In some embodiments, the disease or condition is retinitis pigmentosa. In some embodiments, the one or more symptoms include a broad spectrum of severity, some starting in childhood others later in adulthood depending on the mutation. In some embodiments, the one or more symptoms include night blindness, peripheral vision loss, and/or eventually symptoms affecting central vision. In some embodiments, the disease or condition is caused by one or more gene mutations. In some embodiments, the disease or condition involves ˜60 gene mutations. In some embodiments, the disease or condition involves autosomal dominant mutation(s) in RHO, which can account for about 20-30% of cases. In some embodiments, the disease or condition involves autosomal recessive mutation(s) in USH2A (Usher syndrome type II), which can account for about 10-15% of cases and can have a prevalence of about ˜4 in 100,000). In some embodiments, the one or more symptoms start in late adolescence/early adulthood. In some embodiments, the disease or condition has a prevalence of about 1 in 4,000.

[0143] In some embodiments, the one or more transgenes include a gene expressed in a retinal pigment epithelium (RPE) cell in a subject.

[0144] In some embodiments, the disease or condition is Leber congenital amaurosis (LCA). In some embodiments, the one or more symptoms include severe visual impairment starting in infancy. In some embodiments, the disease or condition is autosomal recessive. In some embodiments, the disease or condition has a prevalence of about 2 in 100,000. In some embodiments, the disease or condition involves one or more mutations in RPE65 and/or CEP290. Other major gene mutation populations are genes expressed primarily in photoreceptors and not in RPE cells.

[0145] In some embodiments, the disease or condition is Fundus albipunctatus. In some embodiments, the one or more symptoms include night blindness and delayed dark adaptation. In some embodiments, the disease or condition is autosomal recessive. In some embodiments, the disease or condition is a type of Congenital stationary night blindness. In some embodiments, the disease or condition involves one or more mutations in RDH5 gene in RPE cells.

[0146] In some embodiments, the disease or condition is Retinitis punctata albescense. In some embodiments, the one or more symptoms can start in childhood and can include night blindness. In some embodiments, the disease or condition is autosomal recessive. In some embodiments, the disease or condition has a prevalence of about 1% of patients with autosomal recessive RCD (1 in 800,000 individuals worldwide). In some embodiments, the disease or condition involves one or more mutations in RLBP1.

[0147] In some embodiments, the disease or condition is inherited retinal dystrophies (IRD). In some embodiments, the disease or condition is IRD caused by one or more MERTK receptor mutations. In some embodiments, the disease or condition is autosomal recessive. In some embodiments, the disease or condition has a prevalence of about 2% of inherited retinal dystrophies (IRD) patients, where IRD has a prevalence of about 1 in 2000).

[0148] In some embodiments, the disease or condition or a symptom thereof can include any one or more of: Stargardt disease; Leber Congenital Amaurosis; Early-Onset Severe Retinal Dystrophy; Retinitis Pigmentosa; Nonsyndromic Retinitis Pigmentosa; Usher Syndrome Types 1-3; Bietti Crystalline Corneoretinal Dystrophy; Congenital Stationary Night Blindness; Fundus Albipunctatus; Retinitis Punctata Albescense; Choroideremia; Achromatopsia; Retinal manifestations of Alstrom Syndrome; Bardet-Biedl Syndrome; Joubert Syndrome; Gyrate Atrophy Of The Choroid and Retina; X-Linked Congenital Retinoschisis; Progressive Bifocal Chorioretinal Atrophy; Retinoblastoma; Uveitis; Diabetic Retinopathy; Diabetic Macular Edema; Persistent Corneal Epithelial Defect; Neurotrophic Keratitis; Chronic Dry Eye; Wet AMD; Dry AMD; Geographic Atopy; and Glaucoma.

[0149] In some embodiments, provided herein are compositions, methods, and uses for gene therapy for ocular disorders. In some embodiments, the recombinant HSV genome or the HSV can be used for topical administration.

### VI. Methods

[0150] Certain aspects of the present disclosure relate to a method of delivering an polypeptide to one or more cells of a subject (e.g., one or more cells of the eye, such as anterior chamber; posterior chamber; ciliary body; corneal epithelial cell; rod cell; cone cell; photoreceptor; retinal pigment epithelial cell; retinal ganglion cell; bipolar cell; horizontal cell; muller cell; amacrine cell; etc.) comprising administering to the subject a pharmaceutical composition comprising (a) any of the viruses described herein (e.g., a herpes simplex virus, such as an HSV-1) comprising any of the recombinant nucleic acids described herein (e.g., a recombinant herpes simplex virus genome, such as a recombinant HSV-1 genome) comprising one or more polynucleotides encoding the polypeptide, and a pharmaceutically acceptable carrier. In some embodiments, the pharmaceutical composition is administered via injection, via injection to the eye, via subretinal injection, via intraocular injection, via intravitreal injection, via suprachoroidal injection, via intracameral injection, intraocularly, intravitreally, topically, subcutaneously, subconjunctivally, subtenonly, intracamerally, retrobulbarly, systemically, parenterally, periocularly, juxtasclerally, anterior juxtasclerally, posterior juxtasclerally, orally, peribulbarly, or suprachoroidally to the subject. In some embodiments, the herpes virus or pharmaceutical composition is administered using an eye drop, an ointment, a paste, a cream, a suspension, an emulsion, a fatty ointment, a gel, a bioadhesive gel, a powder, a lotion, a solution, or a spray. In some embodiments, the herpes virus (e.g., the herpes simplex virus) is replication competent. In some embodiments, the herpes virus (e.g., the herpes simplex virus) is replication defective. In some embodiments, the herpes virus (e.g., the herpes simplex virus) is not oncolytic.

[0151] In some embodiments, the subject is a human. In some embodiments, the subject suffers from an eye condition or disease. In some embodiments, the eye condition or disease is selected from the group consisting of retinitis pigmentosa, recessive retinitis pigmentosa, severe recessive retinitis pigmentosa, dominant retinitis pigmentosa, dominant retinitis pigmentosa with choroidal involvement, recessive retinitis pigmentosa with para-arteriolar preservation of the RPE (PPRPE), recessive retinitis pigmentosa with posterior column ataxia (PCARP), recessive retinitis pigmentosa with erythrocytic microcytosis, syndromic recessive retinitis pigmentosa, recessive syndromic disease with retinitis pigmentosa, non-syndromic recessive retinitis pigmentosa, non-syndromic dominant retinitis pigmentosa, syndromic dominant retinitis pigmentosa, juvenile recessive retinitis pigmentosa, recessive retinitis pigmentosa and mental retardation, recessive retinitis pigmentosa with macular degeneration, severe early-onset recessive retinitis pigmentosa, recessive retinitis pigmentosa and skeletal anomalies, recessive retinitis pigmentosa and skeletal abnormalities, dominant retinitis pigmentosa with sensorineural deafness, recessive retinitis pigmentosa with hearing loss, recessive retinitis pigmentosa with hearing loss and additional disabilities, recessive retinitis pigmentosa with vitreal alterations, early onset with macular coloboma recessive retinitis pigmentosa, X-linked retinitis pigmentosa, recessive X-linked retinitis pigmentosa, dominant X-linked retinitis pigmentosa, severe X-linked retinitis pigmentosa, X-linked retinitis pigmentosa with mental retardation, X-linked retinitis pigmentosa with myopathy, Bardet-Biedl like retinitis pigmentosa, Bardet-Biedl like recessive retinitis pigmentosa, digenic retinitis pigmentosa, digenic retinitis pigmentosa with retinal outer segment membrane protein 1, digenic retinitis pigmentosa with PRPH2, recessive retinitis pigmentosa with early macular involvement, recessive deafness without retinitis pigmentosa, recessive congenital deafness without retinitis pigmentosa, recessive retinitis pigmentosa and recessive ataxia, recessive retinitis pigmentosa and dominant ataxia, mitochondrial retinitis pigmentosa, mitochondrial retinitis pigmentosa with developmental and neurological abnormalities, mitochondrial retinitis pigmentosa with progressive sensorineural hearing loss, mitochondrial retinitis pigmentosa with deafness and neurological abnormalities, Autosomal Dominant Retinitis Pigmentosa, Nonsyndromic Autosomal Dominant Retinitis Pigmentosa, Autosomal Recessive, Retinitis Pigmentosa, Nonsyndromic Autosomal Recessive Retinitis Pigmentosa, Retinal pigment epithelium (RPE), recessive RPE, dominant RPE, recessive RPE degeneration, dominant RPE degeneration, ataxia, recessive ataxia, dominant ataxia, Senior-Loken syndrome, recessive Senior-Loken syndrome, dominant Senior-Loken syndrome, nephronophthisis, recessive nephronophthisis, dominant nephronophthisis, adolescent recessive nephronophthisis, ciliopathy-related recessive nephronophthisis, juvenile nephronophthisis, juvenile recessive nephronophthisis, juvenile dominant nephronophthisis, Usher syndrome, Usher syndrome type I, Usher syndrome type II, Usher syndrome type III, recessive Usher syndrome, atypical recessive Usher syndrome, dominant Usher syndrome, type 2 recessive Usher syndrome, type 2a recessive Usher syndrome, type 3 recessive Usher syndrome, type 3-like recessive Usher syndrome, atypical recessive Usher syndrome, type 1 recessive Usher syndrome, type 1b recessive Usher syndrome, type 1d recessive Usher syndrome, type 1f recessive Usher syndrome, type 1J recessive Usher syndrome, type 1k recessive Usher syndrome, digenic Usher syndrome with CDH23, digenic Usher syndrome with PCDH15, Acadian recessive Usher syndrome, recessive atypical Usher syndrome (USH3-like), Leber congenital amaurosis, recessive Leber congenital amaurosis, dominant Leber congenital amaurosis, de novo Leber congenital amaurosis, dominant Leber congenital amaurosis and pituitary dysfunction, recessive Leber congenital amaurosis with myopathy, recessive Leber congenital amaurosis with severe childhood retinal dystrophy, mitochondrial Leber hereditary optic neuropathy, Leber hereditary optic neuropathy, optic atrophy, recessive optic atrophy, dominant optic atrophy, optic atrophy with ataxia, recessive optic atrophy with ataxia, dominant optic atrophy with ataxia, recessive optic atrophy with ataxia and 3-methylglutaconic aciduria, dominant optic atrophy with cataract, ataxia and areflexia, Kjer type dominant optic atrophy, dominant optic atrophy with sensorineural hearing loss, recessive cerebellar degeneration with optic atrophy, optic atrophy with deadness-dystonia syndrome, X-linked optic atrophy with deadness-dystonia syndrome, retinal dystrophy, recessive retinal dystrophy, dominant retinal dystrophy, inherited retinal dystrophy, early onset recessive retinal dystrophy, recessive syndromic retinal dystrophy, recessive non-syndromic retinal dystrophy, recessive syndromic and non-syndromic retinal dystrophy, recessive optic atrophy and retinal dystrophy, recessive retinal dystrophy and obesity, recessive retinal dystrophy and cerebellar dysplasia, syndromic recessive optic atrophy and retinal dystrophy, dominant retinal dystrophy with iris coloboma, spectrum of ciliopathies including retinal dystrophy, recessive spectrum of ciliopathies including retinal dystrophy, dominant spectrum of ciliopathies including retinal dystrophy, dominant optic atrophy with neuropathy and myopathy, dominant optic atrophy with intellectual disability and developmental delay, syndromic optic atrophy, non-syndromic optic atrophy, recessive non-syndromic optic atrophy, dominant non-syndromic optic atrophy, recessive syndromic optic atrophy, dominant syndromic optic atrophy, Charcot-Marie-Tooth disease, recessive Charcot-Marie-Tooth disease, dominant Charcot-Marie-Tooth disease, benign fleck retina, recessive benign fleck retina, dominant benign fleck retina, syndromic retinopathy, recessive syndromic retinopathy, dominant syndromic retinopathy, Batten disease, recessive Batten disease, dominant Batten disease, recessive Batten disease (ceroid-lipofuscinosis, neuronal 3), juvenile recessive Batten disease (ceroid-lipofuscinosis, neuronal 3), neuronal ceroid lipofuscinosis, recessive neuronal ceroid lipofuscinosis, recessive neuronal ceroid lipofuscinosis 1, dominant neuronal ceroid lipofuscinosis, Stargardt disease, recessive Stargardt disease, dominant Stargardt disease, juvenile Stargardt disease, late onset Stargardt disease, Stargardt-like macular dystrophy, recessive Stargardt-like macular dystrophy, dominant Stargardt-like macular dystrophy, macular dystrophy, recessive macular dystrophy, early onset macular dystrophy, adult onset macular dystrophy, early onset recessive macular dystrophy, adult onset recessive macular dystrophy, early adult onset recessive macular dystrophy, juvenile with hypotrichosis recessive macular dystrophy, dominant macular dystrophy, late onset dominant macular dystrophy, dominant macular dystrophy with lens zonules, bull's-eye dominant macular dystrophy, butterfly-shaped dominant macular dystrophy, age-related dominant macular dystrophy, benign concentric annular dominant macular dystrophy, vitelliform recessive macular dystrophy, vitelliform dominant macular dystrophy, atypical vitelliform dominant macular dystrophy, dominant adult vitelliform macular dystrophy, Stargardt-like dominant macular dystrophy, Stargardt type dominant macular dystrophy, North Carolina dominant macular dystrophy, North Carolina-like dominant macular dystrophy, North Carolina-like with progressive sensorineural hearing loss dominant macular dystrophy, cystoid dominant macular dystrophy, Best type dominant macular dystrophy, occult macular dystrophy, recessive occult macular dystrophy, dominant occult macular dystrophy, age-related familial macular dystrophy, X-linked atrophic macular dystrophy, recessive X-linked atrophic macular dystrophy, dominant X-linked atrophic macular dystrophy, mitochondrial macular pattern dystrophy with type II diabetes and deafness, fundus flavimaculatus, recessive fundus flavimaculatus, dominant fundus flavimaculatus, rod dystrophy, recessive rod dystrophy, dominant rod dystrophy, cone dystrophy, recessive cone dystrophy, dominant cone dystrophy, recessive cone dystrophy with supernormal rod electroretinogram, early onset recessive cone dystrophy, late onset recessive cone dystrophy, cone dystrophy 1, X-linked cone dystrophy 1, cone dystrophy 2, progressive cone dystrophy 2, X-linked progressive cone dystrophy 2, delayed cone adaptation, recessive delayed cone adaptation, dominant delayed cone adaptation, cone-rod dystrophy, recessive cone-rod dystrophy, dominant cone-rod dystrophy, isolated cone-rod dystrophy, progressive cone-rod dystrophy, X-linked cone-rod dystrophy, X-linked progressive cone-rod dystrophy, progressive dominant cone-rod dystrophy, cone-rod dystrophy and amelogenesis imperfecta syndrome, recessive cone-rod dystrophy and amelogenesis imperfecta syndrome, dominant cone-rod dystrophy and amelogenesis imperfecta syndrome, recessive cone-rod dystrophy with inner retinopathy, recessive cone-rod dystrophy with skeletal disease, congenital syndromic nonprogressive recessive cone-rod dystrophy, recessive cone-rod dystrophy with hearing loss, recessive cone-rod dystrophy with psychomotor delay, recessive cone and cone-rod dystrophy, cone-rod synaptic disease, congenital cone-rod synaptic disease, recessive congenital cone-rod synaptic disease, dominant congenital cone-rod synaptic disease, rod-cone dystrophy, recessive rod-cone dystrophy, dominant rod-cone dystrophy, early onset recessive rod-cone dystrophy, non-syndromic recessive rod-cone dystrophy, recessive Newfoundland rod-cone dystrophy, recessive progressive cone dystrophy, Stickler syndrome, dominant Stickler syndrome, recessive Stickler syndrome, dominant Stickler syndrome type I, dominant Stickler syndrome type II, Marshall syndrome, dominant Marshall syndrome, recessive Marshall syndrome, achromatopsia, recessive achromatopsia, dominant achromatopsia, recessive complete achromatopsia, recessive incomplete achromatopsia, macular degeneration, age-related macular degeneration, complex etiology age-related macular degeneration, isolated age-related macular degeneration, wet age-related macular degeneration, dry age-related macular degeneration, drusen, recessive drusen, dominant drusen, early-onset recessive drusen, early-onset dominant drusen, macular drusen, dominant radial macular drusen, pigmented paravenous chorioretinal atrophy, recessive pigmented paravenous chorioretinal atrophy, dominant pigmented paravenous chorioretinal atrophy, progressive Bifocal Chorioretinal Atrophy, Bardet-Biedl syndrome, recessive Bardet-Biedl syndrome, dominant Bardet-Biedl syndrome, recessive Bardet-Biedl syndrome with developmental anomalies, retinal degeneration, recessive retinal degeneration, dominant retinal degeneration, non-syndromic recessive retinal degeneration, Doyne honeycomb retinal degeneration, recessive Doyne honeycomb retinal degeneration, dominant Doyne honeycomb retinal degeneration (Malattia Leventinese), recessive nephronophthisis with retinal degeneration, Alström syndrome, recessive Alström syndrome, dominant Alström syndrome, Joubert syndrome, recessive Joubert syndrome, dominant Joubert syndrome, Jobert syndrome, recessive Jobert syndrome, dominant Jobert syndrome, X-linked Jobert syndrome, vitreoretinal degeneration, recessive vitreoretinal degeneration, dominant vitreoretinal degeneration, snowflake vitreoretinal degeneration, snowflake dominant vitreoretinal degeneration, Oguchi disease, recessive Oguchi disease, dominant Oguchi disease, night blindness, stationary night blindness, congenital night blindness, congenital stationary night blindness, severe congenital stationary night blindness, recessive congenital stationary night blindness, recessive complete congenital stationary night blindness, dominant congenital stationary night blindness, Nougaret type dominant congenital stationary night blindness, Oguchi type recessive congenital stationary night blindness, Riggs type recessive congenital stationary night blindness, Schubert-Bornschein type recessive congenital stationary night blindness, fundus albipunctatus type recessive congenital stationary night blindness, complete recessive congenital stationary night blindness, X-linked congenital stationary night blindness, incomplete X-linked congenital stationary night blindness, retinal vasculopathy, cerebral leukodystrophy, retinal vasculopathy with cerebral leukodystrophy, recessive retinal vasculopathy with cerebral leukodystrophy, dominant retinal vasculopathy with cerebral leukodystrophy, Aicardi-Goutiere syndrome, Aicardi-Goutiere syndrome 1, recessive Aicardi-Goutiere syndrome 1, dominant Aicardi-utiere syndrome 1, chilblain lupus, recessive chilblain lupus, dominant chilblain lupus, Martinique retinal dystrophy and retinitis pigmentosa, recessive Martinique retinal dystrophy and retinitis pigmentosa, dominant Martinique retinal dystrophy and retinitis pigmentosa, spinocerebellar ataxia, recessive spinocerebellar ataxia, dominant spinocerebellar ataxia, spinocerebellar ataxia with macular dystrophy, spinocerebellar ataxia with retinal degeneration, spinocerebellar ataxia with macular dystrophy or retinal degeneration, recessive spinocerebellar ataxia with macular dystrophy or retinal degeneration, dominant spinocerebellar ataxia with macular dystrophy or retinal degeneration, Wolfram syndrome, recessive Wolfram syndrome, dominant Wolfram syndrome, low frequency sensorineural hearing loss, recessive low frequency sensorineural hearing loss, dominant low frequency sensorineural hearing loss, oculoauricular syndrome, recessive oculoauricular syndrome, dominant oculoauricular syndrome, recessive renal, skeletal and retinal anomalies, recessive abetalipoproteinemia, microcephaly, recessive microcephaly, dominant microcephaly, growth failure and retinopathy recessive microcephaly, Bietti crystalline corneoretinal dystrophy, recessive Bietti crystalline corneoretinal dystrophy, dominant Bietti crystalline corneoretinal dystrophy, Wagner disease, erosive vitreoretinopathy, Wagner disease and erosive vitreoretinopathy, recessive Wagner disease and erosive vitreoretinopathy, dominant Wagner disease and erosive vitreoretinopathy, febrile convulsions, recessive febrile convulsions, dominant febrile convulsions, dominant/recessive febrile convulsions, choroidal dystrophy, recessive choroidal dystrophy, dominant choroidal dystrophy, central areolar choroidal dystrophy, dominant central areolar choroidal dystrophy, recessive central areolar choroidal dystrophy, epiphyseal dysplasia, recessive epiphyseal dysplasia, dominant epiphyseal dysplasia, multiple epiphyseal dysplasia, recessive multiple epiphyseal dysplasia, dominant multiple epiphyseal dysplasia, ichthyosis, recessive ichthyosis, dominant ichthyosis, quadriplegia and retardation recessive ichthyosis, chorioretinal atrophy, bifocal chorioretinal atrophy, progressive bifocal chorioretinal atrophy, recessive progressive bifocal chorioretinal atrophy, dominant progressive bifocal chorioretinal atrophy, Refsum disease, recessive Refsum disease, dominant Refsum disease, adult form recessive Refsum disease, infantile form recessive Refsum disease, retinal-cone dystrophy, recessive retinal-cone dystrophy, dominant retinal-cone dystrophy, retinal-cone dystrophy 1, recessive retinal-cone dystrophy 1, dominant retinal-cone dystrophy 1, tritanopia, recessive tritanopia, dominant tritanopia, mucopolysaccharidosis, recessive mucopolysaccharidosis, dominant mucopolysaccharidosis, achromatopsia Pingelapese, recessive achromatopsia Pingelapese, dominant achromatopsia Pingelapese, Klippel-Feil syndrome, recessive Klippel-Feil syndrome, dominant Klippel-Feil syndrome, microphthalmia, recessive microphthalmia, dominant microphthalmia, limb-girdle muscular dystrophy, recessive limb-girdle muscular dystrophy, dominant limb-girdle muscular dystrophy, short-rib thoracic dysplasia, recessive short-rib thoracic dysplasia, dominant short-rib thoracic dysplasia, polydactyly recessive short-rib thoracic dysplasia, retinal dystrophy recessive short-rib thoracic dysplasia, mental retardation, truncal obesity, retinal dystrophy, and micropenis (MORM) syndrome, recessive MORM syndrome, dominant MORM syndrome, spasticity and retinal degeneration recessive retardation, Cockayne syndrome, recessive Cockayne syndrome, dominant Cockayne syndrome, congenital retinal nonattachment, recessive nonsyndromal congenital retinal nonattachment, dominant nonsyndromal congenital retinal nonattachment, hemolytic anemia, nonspherocytic hemolytic anemia, recessive nonspherocytic hemolytic anemia, dominant nonspherocytic hemolytic anemia, hereditary neuropathy, hereditary neuropathy (Russe type), recessive hereditary neuropathy (Russe type), dominant hereditary neuropathy (Russe type), choroidal sclerosis, recessive choroidal sclerosis, dominant choroidal sclerosis, retinopathy, recessive retinopathy, dominant retinopathy, combined dominant and recessive retinopathy, diffuse dominant retinopathy, variable dominant retinopathy, diffuse and variable dominant retinopathy, microcephaly, recessive microcephaly, dominant microcephaly, lymphedema dominant microcephaly, chorioretinopathy dominant microcephaly, lymphedema and chorioretinopathy dominant microcephaly, chorioretinopathy, recessive chorioretinopathy, dominant chorioretinopathy, chorioretinopathy and microcephaly, recessive chorioretinopathy and microcephaly, dominant chorioretinopathy and microcephaly, renal-coloboma syndrome, recessive renal-coloboma syndrome, dominant renal-coloboma syndrome, non-syndromic deafness, recessive non-syndromic deafness, dominant non-syndromic deafness, gyrate atrophy, recessive gyrate atrophy, dominant gyrate atrophy, gyrate atrophy of the choroid and retina, vitreoretinopathy, exudative vitreoretinopathy, familial exudative vitreoretinopathy, recessive familial exudative vitreoretinopathy, dominant familial exudative vitreoretinopathy, dominant familial exudative vitreoretinopathy and Coats disease, neovascular inflammatory vitreoretinopathy, recessive neovascular inflammatory vitreoretinopathy, dominant neovascular inflammatory vitreoretinopathy, atrophia areata, recessive atrophia areata, dominant atrophia areata, Meckel syndrome, recessive Meckel syndrome, dominant Meckel syndrome, vitreoretinochoroidopathy, recessive vitreoretinochoroidopathy, dominant vitreoretinochoroidopathy, bestrophinopathy, recessive bestrophinopathy, dominant bestrophinopathy, high bone mass trait, recessive high bone mass trait, dominant high bone mass trait, osteoporosis-pseudoglioma syndrome, recessive osteoporosis-pseudoglioma syndrome, dominant osteoporosis-pseudoglioma syndrome, microphthalmos, recessive microphthalmos, dominant microphthalmos, retinal disease syndrome, recessive retinal disease syndrome, dominant retinal disease syndrome, microphthalmos and retinal disease syndrome, recessive microphthalmos and retinal disease syndrome, dominant microphthalmos and retinal disease syndrome, nanophthalmos, recessive nanophthalmos, dominant nanophthalmos, bone dysplasias, recessive bone dysplasias, dominant bone dysplasias, developmental disorders, osteoarthritic diseases and syndromic disorders, cavitary optic disc anomalies, recessive cavitary optic disc anomalies, dominant cavitary optic disc anomalies, fundus albipunctatus, recessive fundus albipunctatus, dominant fundus albipunctatus, mevalonic aciduria, recessive mevalonic aciduria, dominant mevalonic aciduria, hyper-IgD syndrome, recessive hyper-IgD syndrome, dominant hyper-IgD syndrome, spastic paraplegia, recessive spastic paraplegia, dominant spastic paraplegia, neuropathy recessive spastic paraplegia, optic atrophy recessive spastic paraplegia, neuropathy and optic atrophy recessive spastic paraplegia (dementia), recessive dementia, dominant dementia, familial dominant dementia, retinoblastoma, recessive retinoblastoma, dominant retinoblastoma, germline retinoblastoma, somatic retinoblastoma, dominant germline or somatic retinoblastoma, retinoma, benign retinoma, pinealoma, osteogenic sarcoma, rod monochromacy, recessive rod monochromacy, dominant rod monochromacy, achromatopsia, recessive achromatopsia, dominant achromatopsia, rod achromatopsia, rod recessive achromatopsia, rod dominant achromatopsia, recessive rod monochromacy or achromatopsia, pattern dystrophy, recessive pattern dystrophy, dominant pattern dystrophy, S-cone syndrome, enhanced S-cone syndrome (ESC), recessive ESC, dominant ESC, Goldmann-Favre syndrome, recessive Goldmann-Favre syndrome, dominant Goldmann-Favre syndrome, Bothnia dystrophy, recessive Bothnia dystrophy, dominant Bothnia dystrophy, retinitis punctata albescens, recessive retinitis punctata albescens, dominant retinitis punctata albescens, mucolipidosis III gamma, recessive mucolipidosis III gamma, dominant mucolipidosis III gamma, Mainzer-Saldino syndrome, recessive Mainzer-Saldino syndrome, dominant Mainzer-Saldino syndrome, pseudoxanthoma elasticum, recessive pseudoxanthoma elasticum, dominant pseudoxanthoma elasticum, Knobloch syndrome, recessive Knobloch syndrome, dominant Knobloch syndrome, foveal hypoplasia, recessive foveal hypoplasia, dominant foveal hypoplasia, anterior segment dysgenesis, recessive anterior segment dysgenesis, dominant anterior segment dysgenesis, foveal hypoplasia and anterior segment dysgenesis, recessive foveal hypoplasia and anterior segment dysgenesis, dominant foveal hypoplasia and anterior segment dysgenesis, spastic ataxia, recessive spastic ataxia, dominant spastic ataxia, de Grouchy syndrome, Boucher-Neuhauser syndrome, recessive Boucher-Neuhauser syndrome, dominant Boucher-Neuhauser syndrome, Boucher-Neuhauser syndrome with chorioretinal dystrophy, recessive Boucher-Neuhauser syndrome with chorioretinal dystrophy, dominant Boucher-Neuhauser syndrome with chorioretinal dystrophy, hypoprebetalipoproteinemia, acanthocytosis, retinitis pigmentosa, and palladial (HARP), degeneration, recessive HARP degeneration, dominant HARP degeneration, Hallervorden-Spatz syndrome, recessive Hallervorden-Spatz syndrome, dominant Hallervorden-Spatz syndrome, Alagille syndrome, recessive Alagille syndrome, dominant Alagille syndrome, polyneuropathy, hearing loss, ataxia, retinitis pigmentosa and early-onset cataract (PHARC), recessive PHARC, dominant PHARC, recessive syndromic PHARC, Sorsby's fundus dystrophy, recessive Sorsby's fundus dystrophy, dominant Sorsby's fundus dystrophy, vitreoretinal dystrophy, recessive vitreoretinal dystrophy, dominant vitreoretinal dystrophy, optic neuropathy, recessive optic neuropathy, dominant optic neuropathy, late onset dominant optic neuropathy, orofaciodigital syndrome 1, Simpson-Golabi-Behmel syndrome 2, X-linked retinoschisis, X-linked Oregon eye disease, X-linked optic atrophy, retinal dysplasia, recessive retinal dysplasia, dominant retinal dysplasia, X-linked retinal dysplasia, primary X-linked retinal dysplasia, X-linked Norrie disease, Coats disease, X-linked Åland Island eye disease, Autoimmune Inner Ear Disease (AIED), AIED-like disease, choroideremia, X-linked choroideremia, neuropathy, optic atrophy, deafness and retinitis pigmentosa, X-linked neuropathy, optic atrophy, deafness and retinitis pigmentosa, X-linked blue cone monochromacy, X-linked protanomaly and rare macular dystrophy in blue cone monochromacy (BCM), X-linked deuteranomaly and rare macular dystrophy in blue cone monochromacy (BCM), mitochondrial Kearns-Sayre syndrome including retinal pigmentary degeneration, Leigh syndrome, retinopathy, mitochondrial pigmentary retinopathy and sensorineural hearing loss, ocular albinism, oculocutaneous albinism, Neuronal ceroid lipofuscinoses, Zellweger spectrum disorder, Cobalamin C deficiency, blue-cone monochromatism, hereditary red-green color vision defects, tritan and yellow-blue defects, bradyopsia, delayed cone adaptation, Uveitis, Diabetic Retinopathy, Diabetic Macular Edema, Persistent Corneal Epithelial Defect, Neurotrophic Keratitis, Herpes Stromal Keratitis, Chronic Dry Eye, Glaucoma, ocular abrasion, ocular blistering, ocular scarring, vision loss, blindness, corneal blindness, dry eye disease, aqueous deficiency dry eye disease, Sjögren's syndrome-related aqueous deficiency dry eye disease, non-Sjögren's syndrome-related dry eye disease, evaporative dry eye disease, meibomian gland dysfunction, blepharitis, lid margin inflammation, ocular rosacea and atopy, aqueous deficiency and evaporative dry eye disease, Fuchs dystrophy, Fuchs endothelial corneal dystrophy (FECD), Fuchs endothelial dystrophy (FED), panuveitis, diffuse uveitis, total uveitis, cataract, partial cataracts, complete cataracts, stationary cataracts, progressive cataracts, hard cataracts, soft cataracts, nuclear cataracts, nuclear sclerosis cataracts, cortical cataracts, posterior subcapsular cataracts, congenital cataracts, corneal dystrophy, Epithelial and subepithelial dystrophies, Epithelial basement membrane dystrophy, Epithelial recurrent erosion dystrophies (Franceschetti corneal dystrophy, Dystrophia Smolandiensis, and/or Dystrophia Helsinglandica), Subepithelial mucinous corneal dystrophy, Meesmann corneal dystrophy, Lisch epithelial corneal dystrophy, Gelatinous drop-like corneal dystrophy, Bowman Layer dystrophies, Reis-Bücklers corneal dystrophy, Thiel-Behnke corneal dystrophy, Stromal dystrophies-TGFB1 corneal dystrophies, Lattice corneal dystrophy, type 1 variants (III, IIIA, I/IIIA, IV) of lattice corneal dystrophy, Granular corneal dystrophy, type 1, Granular corneal dystrophy, type 2, Stromal dystrophies, Macular corneal dystrophy, Schnyder crystalline corneal dystrophy, Congenital stromal corneal dystrophy, Fleck corneal dystrophy, Posterior amorphous corneal dystrophy, Central cloudy dystrophy of François, Pre-Descemet corneal dystrophy, Endothelial dystrophies, Fuchs' dystrophy, Posterior polymorphous corneal dystrophy, Congenital hereditary endothelial dystrophy, X-linked endothelial corneal dystrophy, Superficial dystrophies, Epithelial basement membrane dystrophy, Meesmann juvenile epithelial corneal dystrophy, Gelatinous drop-like corneal dystrophy, Lisch epithelial corneal dystrophy, Subepithelial mucinous corneal dystrophy, Reis-Bucklers corneal dystrophy, Thiel-Behnke dystrophy, Stromal dystrophies, Lattice corneal dystrophy, Granular corneal dystrophy, Macular corneal dystrophy, Schnyder crystalline corneal dystrophy, Congenital stromal corneal dystrophy, Fleck corneal dystrophy, Posterior dystrophies, Fuchs' dystrophy, Posterior polymorphous corneal dystrophy, Congenital hereditary endothelial dystrophy, keratopathy, band keratopathy, corneal band keratopathy, and calcific band keratopathy. In some embodiments, the subject suffers from Stargardt disease. In some embodiments, the subject suffers from neurotrophic keratitis. In some embodiments, the subject suffers from Leber congenital amaurosis.

[0152] In some embodiments, administration of the recombinant nucleic acid, virus, medicament, and/or pharmaceutical composition or formulation to the subject increases the polypeptide levels (transcript or protein levels) by at least about 2-fold in one or more contacted or treated cells of the subject, as compared to the endogenous levels of the polypeptide in one or more corresponding untreated cells in the subject. For example, administration of the recombinant nucleic acid, virus, medicament, and/or pharmaceutical composition or formulation may increase the polypeptide levels (transcript or protein levels) by at least about 2-fold, at least about 3-fold, at least about 4-fold, at least about 5-fold, at least about 6-fold, at least about 7-fold, at least about 8-fold, at least about 9-fold, at least about 10-fold, at least about 15-fold, at least about 20-fold, at least about 25-fold, at least about 50-fold, at least about 75-fold, at least about 100-fold, at least about 250-fold, at least about 500-fold, at least about 750-fold, at least about 1000-fold, or more in one or more contacted or treated cells of the subject, as compared to the endogenous levels of the polypeptide in one or more corresponding untreated cells in the subject. In some embodiments, the one or more contacted or treated cells are one or more cells of the eye. Methods of measuring transcript or protein levels from a sample are well known to one of ordinary skill in the art, including, for example, qPCR, western blot, mass spectrometry, etc.

[0153] Other aspects of the present disclosure relate to a method of providing prophylactic, palliative, or therapeutic relief to one or more signs or symptoms of an eye condition or disease in a subject in need thereof comprising administering to the subject an effective amount of any of the recombinant nucleic acids, viruses, medicaments, and/or pharmaceutical compositions or formulations described herein. In some embodiments, the subject is a human. In some embodiments, the subject suffers from an eye condition or disease. In some embodiments, the eye condition or disease is selected from the group consisting of retinitis pigmentosa, recessive retinitis pigmentosa, severe recessive retinitis pigmentosa, dominant retinitis pigmentosa, dominant retinitis pigmentosa with choroidal involvement, recessive retinitis pigmentosa with para-arteriolar preservation of the RPE (PPRPE), recessive retinitis pigmentosa with posterior column ataxia (PCARP), recessive retinitis pigmentosa with erythrocytic microcytosis, syndromic recessive retinitis pigmentosa, recessive syndromic disease with retinitis pigmentosa, non-syndromic recessive retinitis pigmentosa, non-syndromic dominant retinitis pigmentosa, syndromic dominant retinitis pigmentosa, juvenile recessive retinitis pigmentosa, recessive retinitis pigmentosa and mental retardation, recessive retinitis pigmentosa with macular degeneration, severe early-onset recessive retinitis pigmentosa, recessive retinitis pigmentosa and skeletal anomalies, recessive retinitis pigmentosa and skeletal abnormalities, dominant retinitis pigmentosa with sensorineural deafness, recessive retinitis pigmentosa with hearing loss, recessive retinitis pigmentosa with hearing loss and additional disabilities, recessive retinitis pigmentosa with vitreal alterations, early onset with macular coloboma recessive retinitis pigmentosa, X-linked retinitis pigmentosa, recessive X-linked retinitis pigmentosa, dominant X-linked retinitis pigmentosa, severe X-linked retinitis pigmentosa, X-linked retinitis pigmentosa with mental retardation, X-linked retinitis pigmentosa with myopathy, Bardet-Biedl like retinitis pigmentosa, Bardet-Biedl like recessive retinitis pigmentosa, digenic retinitis pigmentosa, digenic retinitis pigmentosa with retinal outer segment membrane protein 1, digenic retinitis pigmentosa with PRPH2, recessive retinitis pigmentosa with early macular involvement, recessive deafness without retinitis pigmentosa, recessive congenital deafness without retinitis pigmentosa, recessive retinitis pigmentosa and recessive ataxia, recessive retinitis pigmentosa and dominant ataxia, mitochondrial retinitis pigmentosa, mitochondrial retinitis pigmentosa with developmental and neurological abnormalities, mitochondrial retinitis pigmentosa with progressive sensorineural hearing loss, mitochondrial retinitis pigmentosa with deafness and neurological abnormalities, Autosomal Dominant Retinitis Pigmentosa, Nonsyndromic Autosomal Dominant Retinitis Pigmentosa, Autosomal Recessive, Retinitis Pigmentosa, Nonsyndromic Autosomal Recessive Retinitis Pigmentosa, Retinal pigment epithelium (RPE), recessive RPE, dominant RPE, recessive RPE degeneration, dominant RPE degeneration, ataxia, recessive ataxia, dominant ataxia, Senior-Loken syndrome, recessive Senior-Loken syndrome, dominant Senior-Loken syndrome, nephronophthisis, recessive nephronophthisis, dominant nephronophthisis, adolescent recessive nephronophthisis, ciliopathy-related recessive nephronophthisis, juvenile nephronophthisis, juvenile recessive nephronophthisis, juvenile dominant nephronophthisis, Usher syndrome, Usher syndrome type I, Usher syndrome type II, Usher syndrome type III, recessive Usher syndrome, atypical recessive Usher syndrome, dominant Usher syndrome, type 2 recessive Usher syndrome, type 2a recessive Usher syndrome, type 3 recessive Usher syndrome, type 3-like recessive Usher syndrome, atypical recessive Usher syndrome, type 1 recessive Usher syndrome, type 1b recessive Usher syndrome, type 1d recessive Usher syndrome, type 1f recessive Usher syndrome, type 1J recessive Usher syndrome, type 1k recessive Usher syndrome, digenic Usher syndrome with CDH23, digenic Usher syndrome with PCDH15, Acadian recessive Usher syndrome, recessive atypical Usher syndrome (USH3-like), Leber congenital amaurosis, recessive Leber congenital amaurosis, dominant Leber congenital amaurosis, de novo Leber congenital amaurosis, dominant Leber congenital amaurosis and pituitary dysfunction, recessive Leber congenital amaurosis with myopathy, recessive Leber congenital amaurosis with severe childhood retinal dystrophy, mitochondrial Leber hereditary optic neuropathy, Leber hereditary optic neuropathy, optic atrophy, recessive optic atrophy, dominant optic atrophy, optic atrophy with ataxia, recessive optic atrophy with ataxia, dominant optic atrophy with ataxia, recessive optic atrophy with ataxia and 3-methylglutaconic aciduria, dominant optic atrophy with cataract, ataxia and areflexia, Kjer type dominant optic atrophy, dominant optic atrophy with sensorineural hearing loss, recessive cerebellar degeneration with optic atrophy, optic atrophy with deadness-dystonia syndrome, X-linked optic atrophy with deadness-dystonia syndrome, retinal dystrophy, recessive retinal dystrophy, dominant retinal dystrophy, inherited retinal dystrophy, early onset recessive retinal dystrophy, recessive syndromic retinal dystrophy, recessive non-syndromic retinal dystrophy, recessive syndromic and non-syndromic retinal dystrophy, recessive optic atrophy and retinal dystrophy, recessive retinal dystrophy and obesity, recessive retinal dystrophy and cerebellar dysplasia, syndromic recessive optic atrophy and retinal dystrophy, dominant retinal dystrophy with iris coloboma, spectrum of ciliopathies including retinal dystrophy, recessive spectrum of ciliopathies including retinal dystrophy, dominant spectrum of ciliopathies including retinal dystrophy, dominant optic atrophy with neuropathy and myopathy, dominant optic atrophy with intellectual disability and developmental delay, syndromic optic atrophy, non-syndromic optic atrophy, recessive non-syndromic optic atrophy, dominant non-syndromic optic atrophy, recessive syndromic optic atrophy, dominant syndromic optic atrophy, Charcot-Marie-Tooth disease, recessive Charcot-Marie-Tooth disease, dominant Charcot-Marie-Tooth disease, benign fleck retina, recessive benign fleck retina, dominant benign fleck retina, syndromic retinopathy, recessive syndromic retinopathy, dominant syndromic retinopathy, Batten disease, recessive Batten disease, dominant Batten disease, recessive Batten disease (ceroid-lipofuscinosis, neuronal 3), juvenile recessive Batten disease (ceroid-lipofuscinosis, neuronal 3), neuronal ceroid lipofuscinosis, recessive neuronal ceroid lipofuscinosis, recessive neuronal ceroid lipofuscinosis 1, dominant neuronal ceroid lipofuscinosis, Stargardt disease, recessive Stargardt disease, dominant Stargardt disease, juvenile Stargardt disease, late onset Stargardt disease, Stargardt-like macular dystrophy, recessive Stargardt-like macular dystrophy, dominant Stargardt-like macular dystrophy, macular dystrophy, recessive macular dystrophy, early onset macular dystrophy, adult onset macular dystrophy, early onset recessive macular dystrophy, adult onset recessive macular dystrophy, early adult onset recessive macular dystrophy, juvenile with hypotrichosis recessive macular dystrophy, dominant macular dystrophy, late onset dominant macular dystrophy, dominant macular dystrophy with lens zonules, bull's-eye dominant macular dystrophy, butterfly-shaped dominant macular dystrophy, age-related dominant macular dystrophy, benign concentric annular dominant macular dystrophy, vitelliform recessive macular dystrophy, vitelliform dominant macular dystrophy, atypical vitelliform dominant macular dystrophy, dominant adult vitelliform macular dystrophy, Stargardt-like dominant macular dystrophy, Stargardt type dominant macular dystrophy, North Carolina dominant macular dystrophy, North Carolina-like dominant macular dystrophy, North Carolina-like with progressive sensorineural hearing loss dominant macular dystrophy, cystoid dominant macular dystrophy, Best type dominant macular dystrophy, occult macular dystrophy, recessive occult macular dystrophy, dominant occult macular dystrophy, age-related familial macular dystrophy, X-linked atrophic macular dystrophy, recessive X-linked atrophic macular dystrophy, dominant X-linked atrophic macular dystrophy, mitochondrial macular pattern dystrophy with type II diabetes and deafness, fundus flavimaculatus, recessive fundus flavimaculatus, dominant fundus flavimaculatus, rod dystrophy, recessive rod dystrophy, dominant rod dystrophy, cone dystrophy, recessive cone dystrophy, dominant cone dystrophy, recessive cone dystrophy with supernormal rod electroretinogram, early onset recessive cone dystrophy, late onset recessive cone dystrophy, cone dystrophy 1, X-linked cone dystrophy 1, cone dystrophy 2, progressive cone dystrophy 2, X-linked progressive cone dystrophy 2, delayed cone adaptation, recessive delayed cone adaptation, dominant delayed cone adaptation, cone-rod dystrophy, recessive cone-rod dystrophy, dominant cone-rod dystrophy, isolated cone-rod dystrophy, progressive cone-rod dystrophy, X-linked cone-rod dystrophy, X-linked progressive cone-rod dystrophy, progressive dominant cone-rod dystrophy, cone-rod dystrophy and amelogenesis imperfecta syndrome, recessive cone-rod dystrophy and amelogenesis imperfecta syndrome, dominant cone-rod dystrophy and amelogenesis imperfecta syndrome, recessive cone-rod dystrophy with inner retinopathy, recessive cone-rod dystrophy with skeletal disease, congenital syndromic nonprogressive recessive cone-rod dystrophy, recessive cone-rod dystrophy with hearing loss, recessive cone-rod dystrophy with psychomotor delay, recessive cone and cone-rod dystrophy, cone-rod synaptic disease, congenital cone-rod synaptic disease, recessive congenital cone-rod synaptic disease, dominant congenital cone-rod synaptic disease, rod-cone dystrophy, recessive rod-cone dystrophy, dominant rod-cone dystrophy, early onset recessive rod-cone dystrophy, non-syndromic recessive rod-cone dystrophy, recessive Newfoundland rod-cone dystrophy, recessive progressive cone dystrophy, Stickler syndrome, dominant Stickler syndrome, recessive Stickler syndrome, dominant Stickler syndrome type I, dominant Stickler syndrome type II, Marshall syndrome, dominant Marshall syndrome, recessive Marshall syndrome, achromatopsia, recessive achromatopsia, dominant achromatopsia, recessive complete achromatopsia, recessive incomplete achromatopsia, macular degeneration, age-related macular degeneration, complex etiology age-related macular degeneration, isolated age-related macular degeneration, wet age-related macular degeneration, dry age-related macular degeneration, drusen, recessive drusen, dominant drusen, early-onset recessive drusen, early-onset dominant drusen, macular drusen, dominant radial macular drusen, pigmented paravenous chorioretinal atrophy, recessive pigmented paravenous chorioretinal atrophy, dominant pigmented paravenous chorioretinal atrophy, progressive Bifocal Chorioretinal Atrophy, Bardet-Biedl syndrome, recessive Bardet-Biedl syndrome, dominant Bardet-Biedl syndrome, recessive Bardet-Biedl syndrome with developmental anomalies, retinal degeneration, recessive retinal degeneration, dominant retinal degeneration, non-syndromic recessive retinal degeneration, Doyne honeycomb retinal degeneration, recessive Doyne honeycomb retinal degeneration, dominant Doyne honeycomb retinal degeneration (Malattia Leventinese), recessive nephronophthisis with retinal degeneration, Alström syndrome, recessive Alström syndrome, dominant Alström syndrome, Joubert syndrome, recessive Joubert syndrome, dominant Joubert syndrome, Jobert syndrome, recessive Jobert syndrome, dominant Jobert syndrome, X-linked Jobert syndrome, vitreoretinal degeneration, recessive vitreoretinal degeneration, dominant vitreoretinal degeneration, snowflake vitreoretinal degeneration, snowflake dominant vitreoretinal degeneration, Oguchi disease, recessive Oguchi disease, dominant Oguchi disease, night blindness, stationary night blindness, congenital night blindness, congenital stationary night blindness, severe congenital stationary night blindness, recessive congenital stationary night blindness, recessive complete congenital stationary night blindness, dominant congenital stationary night blindness, Nougaret type dominant congenital stationary night blindness, Oguchi type recessive congenital stationary night blindness, Riggs type recessive congenital stationary night blindness, Schubert-Bornschein type recessive congenital stationary night blindness, fundus albipunctatus type recessive congenital stationary night blindness, complete recessive congenital stationary night blindness, X-linked congenital stationary night blindness, incomplete X-linked congenital stationary night blindness, retinal vasculopathy, cerebral leukodystrophy, retinal vasculopathy with cerebral leukodystrophy, recessive retinal vasculopathy with cerebral leukodystrophy, dominant retinal vasculopathy with cerebral leukodystrophy, Aicardi-Goutiere syndrome, Aicardi-Goutiere syndrome 1, recessive Aicardi-Goutiere syndrome 1, dominant Aicardi-utiere syndrome 1, chilblain lupus, recessive chilblain lupus, dominant chilblain lupus, Martinique retinal dystrophy and retinitis pigmentosa, recessive Martinique retinal dystrophy and retinitis pigmentosa, dominant Martinique retinal dystrophy and retinitis pigmentosa, spinocerebellar ataxia, recessive spinocerebellar ataxia, dominant spinocerebellar ataxia, spinocerebellar ataxia with macular dystrophy, spinocerebellar ataxia with retinal degeneration, spinocerebellar ataxia with macular dystrophy or retinal degeneration, recessive spinocerebellar ataxia with macular dystrophy or retinal degeneration, dominant spinocerebellar ataxia with macular dystrophy or retinal degeneration, Wolfram syndrome, recessive Wolfram syndrome, dominant Wolfram syndrome, low frequency sensorineural hearing loss, recessive low frequency sensorineural hearing loss, dominant low frequency sensorineural hearing loss, oculoauricular syndrome, recessive oculoauricular syndrome, dominant oculoauricular syndrome, recessive renal, skeletal and retinal anomalies, recessive abetalipoproteinemia, microcephaly, recessive microcephaly, dominant microcephaly, growth failure and retinopathy recessive microcephaly, Bietti crystalline corneoretinal dystrophy, recessive Bietti crystalline corneoretinal dystrophy, dominant Bietti crystalline I dystrophy, Wagner disease, erosive vitreoretinopathy, Wagner disease and erosive vitreoretinopathy, recessive Wagner disease and erosive vitreoretinopathy, dominant Wagner disease and erosive vitreoretinopathy, febrile convulsions, recessive febrile convulsions, dominant febrile convulsions, dominant/recessive febrile convulsions, choroidal dystrophy, recessive choroidal dystrophy, dominant choroidal dystrophy, central areolar choroidal dystrophy, dominant central areolar choroidal dystrophy, recessive central areolar choroidal dystrophy, epiphyseal dysplasia, recessive epiphyseal dysplasia, dominant epiphyseal dysplasia, multiple epiphyseal dysplasia, recessive multiple epiphyseal dysplasia, dominant multiple epiphyseal dysplasia, ichthyosis, recessive ichthyosis, dominant ichthyosis, quadriplegia and retardation recessive ichthyosis, chorioretinal atrophy, bifocal chorioretinal atrophy, progressive bifocal chorioretinal atrophy, recessive progressive bifocal chorioretinal atrophy, dominant progressive bifocal chorioretinal atrophy, Refsum disease, recessive Refsum disease, dominant Refsum disease, adult form recessive Refsum disease, infantile form recessive Refsum disease, retinal-cone dystrophy, recessive retinal-cone dystrophy, dominant retinal-cone dystrophy, retinal-cone dystrophy 1, recessive retinal-cone dystrophy 1, dominant retinal-cone dystrophy 1, tritanopia, recessive tritanopia, dominant tritanopia, mucopolysaccharidosis, recessive mucopolysaccharidosis, dominant mucopolysaccharidosis, achromatopsia Pingelapese, recessive achromatopsia Pingelapese, dominant achromatopsia Pingelapese, Klippel-Feil syndrome, recessive Klippel-Feil syndrome, dominant Klippel-Feil syndrome, microphthalmia, recessive microphthalmia, dominant microphthalmia, limb-girdle muscular dystrophy, recessive limb-girdle muscular dystrophy, dominant limb-girdle muscular dystrophy, short-rib thoracic dysplasia, recessive short-rib thoracic dysplasia, dominant short-rib thoracic dysplasia, polydactyly recessive short-rib thoracic dysplasia, retinal dystrophy recessive short-rib thoracic dysplasia, mental retardation, truncal obesity, retinal dystrophy, and micropenis (MORM) syndrome, recessive MORM syndrome, dominant MORM syndrome, spasticity and retinal degeneration recessive retardation, Cockayne syndrome, recessive Cockayne syndrome, dominant Cockayne syndrome, congenital retinal nonattachment, recessive nonsyndromal congenital retinal nonattachment, dominant nonsyndromal congenital retinal nonattachment, hemolytic anemia, nonspherocytic hemolytic anemia, recessive nonspherocytic hemolytic anemia, dominant nonspherocytic hemolytic anemia, hereditary neuropathy, hereditary neuropathy (Russe type), recessive hereditary neuropathy (Russe type), dominant hereditary neuropathy (Russe type), choroidal sclerosis, recessive choroidal sclerosis, dominant choroidal sclerosis, retinopathy, recessive retinopathy, dominant retinopathy, combined dominant and recessive retinopathy, diffuse dominant retinopathy, variable dominant retinopathy, diffuse and variable dominant retinopathy, microcephaly, recessive microcephaly, dominant microcephaly, lymphedema dominant microcephaly, chorioretinopathy dominant microcephaly, lymphedema and chorioretinopathy dominant microcephaly, chorioretinopathy, recessive chorioretinopathy, dominant chorioretinopathy, chorioretinopathy and microcephaly, recessive chorioretinopathy and microcephaly, dominant chorioretinopathy and microcephaly, renal-coloboma syndrome, recessive renal-coloboma syndrome, dominant renal-coloboma syndrome, non-syndromic deafness, recessive non-syndromic deafness, dominant non-syndromic deafness, gyrate atrophy, recessive gyrate atrophy, dominant gyrate atrophy, gyrate atrophy of the choroid and retina, vitreoretinopathy, exudative vitreoretinopathy, familial exudative vitreoretinopathy, recessive familial exudative vitreoretinopathy, dominant familial exudative vitreoretinopathy, dominant familial exudative vitreoretinopathy and Coats disease, neovascular inflammatory vitreoretinopathy, recessive neovascular inflammatory vitreoretinopathy, dominant neovascular inflammatory vitreoretinopathy, atrophia areata, recessive atrophia areata, dominant atrophia areata, Meckel syndrome, recessive Meckel syndrome, dominant Meckel syndrome, vitreoretinochoroidopathy, recessive vitreoretinochoroidopathy, dominant vitreoretinochoroidopathy, bestrophinopathy, recessive bestrophinopathy, dominant bestrophinopathy, high bone mass trait, recessive high bone mass trait, dominant high bone mass trait, osteoporosis-pseudoglioma syndrome, recessive osteoporosis-pseudoglioma syndrome, dominant osteoporosis-pseudoglioma syndrome, microphthalmos, recessive microphthalmos, dominant microphthalmos, retinal disease syndrome, recessive retinal disease syndrome, dominant retinal disease syndrome, microphthalmos and retinal disease syndrome, recessive microphthalmos and retinal disease syndrome, dominant microphthalmos and retinal disease syndrome, nanophthalmos, recessive nanophthalmos, dominant nanophthalmos, bone dysplasias, recessive bone dysplasias, dominant bone dysplasias, developmental disorders, osteoarthritic diseases and syndromic disorders, cavitary optic disc anomalies, recessive cavitary optic disc anomalies, dominant cavitary optic disc anomalies, fundus albipunctatus, recessive fundus albipunctatus, dominant fundus albipunctatus, mevalonic aciduria, recessive mevalonic aciduria, dominant mevalonic aciduria, hyper-IgD syndrome, recessive hyper-IgD syndrome, dominant hyper-IgD syndrome, spastic paraplegia, recessive spastic paraplegia, dominant spastic paraplegia, neuropathy recessive spastic paraplegia, optic atrophy recessive spastic paraplegia, neuropathy and optic atrophy recessive spastic paraplegia (dementia), recessive dementia, dominant dementia, familial dominant dementia, retinoblastoma, recessive retinoblastoma, dominant retinoblastoma, germline retinoblastoma, somatic retinoblastoma, dominant germline or somatic retinoblastoma, retinoma, benign retinoma, pinealoma, osteogenic sarcoma, rod monochromacy, recessive rod monochromacy, dominant rod monochromacy, achromatopsia, recessive achromatopsia, dominant achromatopsia, rod achromatopsia, rod recessive achromatopsia, rod dominant achromatopsia, recessive rod monochromacy or achromatopsia, pattern dystrophy, recessive pattern dystrophy, dominant pattern dystrophy, S-cone syndrome, enhanced S-cone syndrome (ESC), recessive ESC, dominant ESC, Goldmann-Favre syndrome, recessive Goldmann-Favre syndrome, dominant Goldmann-Favre syndrome, Bothnia dystrophy, recessive Bothnia dystrophy, dominant Bothnia dystrophy, retinitis punctata albescens, recessive retinitis punctata albescens, dominant retinitis punctata albescens, mucolipidosis III gamma, recessive mucolipidosis III gamma, dominant mucolipidosis III gamma, Mainzer-Saldino syndrome, recessive Mainzer-Saldino syndrome, dominant Mainzer-Saldino syndrome, pseudoxanthoma elasticum, recessive pseudoxanthoma elasticum, dominant pseudoxanthoma elasticum, Knobloch syndrome, recessive Knobloch syndrome, dominant Knobloch syndrome, foveal hypoplasia, recessive foveal hypoplasia, dominant foveal hypoplasia, anterior segment dysgenesis, recessive anterior segment dysgenesis, dominant anterior segment dysgenesis, foveal hypoplasia and anterior segment dysgenesis, recessive foveal hypoplasia and anterior segment dysgenesis, dominant foveal hypoplasia and anterior segment dysgenesis, spastic ataxia, recessive spastic ataxia, dominant spastic ataxia, de Grouchy syndrome, Boucher-Neuhauser syndrome, recessive Boucher-Neuhauser syndrome, dominant Boucher-Neuhauser syndrome, Boucher-Neuhauser syndrome with chorioretinal dystrophy, recessive Boucher-Neuhauser syndrome with chorioretinal dystrophy, dominant Boucher-Neuhauser syndrome with chorioretinal dystrophy, hypoprebetalipoproteinemia, acanthocytosis, retinitis pigmentosa, and palladial (HARP), degeneration, recessive HARP degeneration, dominant HARP degeneration, Hallervorden-Spatz syndrome, recessive Hallervorden-Spatz syndrome, dominant Hallervorden-Spatz syndrome, Alagille syndrome, recessive Alagille syndrome, dominant Alagille syndrome, polyneuropathy, hearing loss, ataxia, retinitis pigmentosa and early-onset cataract (PHARC), recessive PHARC, dominant PHARC, recessive syndromic PHARC, Sorsby's fundus dystrophy, recessive Sorsby's fundus dystrophy, dominant Sorsby's fundus dystrophy, vitreoretinal dystrophy, recessive vitreoretinal dystrophy, dominant vitreoretinal dystrophy, optic neuropathy, recessive optic neuropathy, dominant optic neuropathy, late onset dominant optic neuropathy, orofaciodigital syndrome 1, Simpson-Golabi-Behmel syndrome 2, X-linked retinoschisis, X-linked Oregon eye disease, X-linked optic atrophy, retinal dysplasia, recessive retinal dysplasia, dominant retinal dysplasia, X-linked retinal dysplasia, primary X-linked retinal dysplasia, X-linked Norrie disease, Coats disease, X-linked Åland Island eye disease, Autoimmune Inner Ear Disease (AIED), AIED-like disease, choroideremia, X-linked choroideremia, neuropathy, optic atrophy, deafness and retinitis pigmentosa, X-linked neuropathy, optic atrophy, deafness and retinitis pigmentosa, X-linked blue cone monochromacy, X-linked protanomaly and rare macular dystrophy in blue cone monochromacy (BCM), X-linked deuteranomaly and rare macular dystrophy in blue cone monochromacy (BCM), mitochondrial Kearns-Sayre syndrome including retinal pigmentary degeneration, Leigh syndrome, retinopathy, mitochondrial pigmentary retinopathy and sensorineural hearing loss, ocular albinism, oculocutaneous albinism, Neuronal ceroid lipofuscinoses, Zellweger spectrum disorder, Cobalamin C deficiency, blue-cone monochromatism, hereditary red-green color vision defects, tritan and yellow-blue defects, bradyopsia, delayed cone adaptation, Uveitis, Diabetic Retinopathy, Diabetic Macular Edema, Persistent Corneal Epithelial Defect, Neurotrophic Keratitis, Herpes Stromal Keratitis, Chronic Dry Eye, Glaucoma, ocular abrasion, ocular blistering, ocular scarring, vision loss, blindness, corneal blindness, dry eye disease, aqueous deficiency dry eye disease, Sjögren's syndrome-related aqueous deficiency dry eye disease, non-Sjögren's syndrome-related dry eye disease, evaporative dry eye disease, meibomian gland dysfunction, blepharitis, lid margin inflammation, ocular rosacea and atopy, aqueous deficiency and evaporative dry eye disease, Fuchs dystrophy, Fuchs endothelial corneal dystrophy (FECD), Fuchs endothelial dystrophy (FED), panuveitis, diffuse uveitis, total uveitis, cataract, partial cataracts, complete cataracts, stationary cataracts, progressive cataracts, hard cataracts, soft cataracts, nuclear cataracts, nuclear sclerosis cataracts, cortical cataracts, posterior subcapsular cataracts, congenital cataracts, corneal dystrophy, Epithelial and subepithelial dystrophies, Epithelial basement membrane dystrophy, Epithelial recurrent erosion dystrophies (Franceschetti corneal dystrophy, Dystrophia Smolandiensis, and/or Dystrophia Helsinglandica), Subepithelial mucinous corneal dystrophy, Meesmann corneal dystrophy, Lisch epithelial corneal dystrophy, Gelatinous drop-like corneal dystrophy, Bowman Layer dystrophies, Reis-Bücklers corneal dystrophy, Thiel-Behnke corneal dystrophy, Stromal dystrophies-TGFB1 corneal dystrophies, Lattice corneal dystrophy, type 1 variants (III, IIIA, I/IIIA, IV) of lattice corneal dystrophy, Granular corneal dystrophy, type 1, Granular corneal dystrophy, type 2, Stromal dystrophies, Macular corneal dystrophy, Schnyder crystalline corneal dystrophy, Congenital stromal corneal dystrophy, Fleck corneal dystrophy, Posterior amorphous corneal dystrophy, Central cloudy dystrophy of François, Pre-Descemet corneal dystrophy, Endothelial dystrophies, Fuchs' dystrophy, Posterior polymorphous corneal dystrophy, Congenital hereditary endothelial dystrophy, X-linked endothelial corneal dystrophy, Superficial dystrophies, Epithelial basement membrane dystrophy, Meesmann juvenile epithelial corneal dystrophy, Gelatinous drop-like corneal dystrophy, Lisch epithelial corneal dystrophy, Subepithelial mucinous corneal dystrophy, Reis-Bucklers corneal dystrophy, Thiel-Behnke dystrophy, Stromal dystrophies, Lattice corneal dystrophy, Granular corneal dystrophy, Macular corneal dystrophy, Schnyder crystalline corneal dystrophy, Congenital stromal corneal dystrophy, Fleck corneal dystrophy, Posterior dystrophies, Fuchs' dystrophy, Posterior polymorphous corneal dystrophy, Congenital hereditary endothelial dystrophy, keratopathy, band keratopathy, corneal band keratopathy, and calcific band keratopathy. In some embodiments, the subject suffers from Stargardt disease. In some embodiments, the subject suffers from neurotrophic keratitis. In some embodiments, the subject suffers from Leber congenital amaurosis.

[0154] The recombinant nucleic acids, viruses, medicaments, and/or pharmaceutical compositions or formulations described herein may be administered by any suitable method or route known in the art, including, without limitation, via injection, via injection to the eye, via subretinal injection, via intraocular injection, via intravitreal injection, via suprachoroidal injection, via intracameral injection, intraocularly, intravitreally, topically, subcutaneously, subconjunctivally, subtenonly, intracamerally, retrobulbarly, systemically, parenterally, periocularly, juxtasclerally, anterior juxtasclerally, posterior juxtasclerally, orally, peribulbarly, suprachoroidally, intranasally, intratracheally, sublingually, buccally, rectally, via inhalation, transdermally, subcutaneously, intradermally, intravenously, intraarterially, intramuscularly, intracardially, intraosseously, intraperitoneally, transmucosally, vaginally, intravitreally, intraorbitally, subretinally, intraarticularly, peri-articularly, locally, epicutaneously, or any combinations thereof. The present disclosure thus encompasses methods of delivering any of the recombinant nucleic acids, viruses, medicaments, or pharmaceutical compositions or formulations described herein to an individual (e.g., an individual having an eye condition or disease). In some embodiments, the recombinant nucleic acids, viruses, medicaments, and/or pharmaceutical compositions or formulations described herein are administered via injection, via injection to the eye, via subretinal injection, via intraocular injection, via intravitreal injection, via suprachoroidal injection, via intracameral injection, intraocularly, intravitreally, topically, subcutaneously, subconjunctivally, subtenonly, intracamerally, retrobulbarly, systemically, parenterally, periocularly, juxtasclerally, anterior juxtasclerally, posterior juxtasclerally, orally, peribulbarly, or suprachoroidally.

[0155] Methods of delivering drugs to the eye are generally known to one of ordinary skill in the art (see e.g., Gaudana et al. Ocular Drug Delivery, The AAPS Journal, Vol. 12, No. 3, September 2010).

[0156] In some embodiments, the recombinant nucleic acids, viruses, medicaments, and/or compositions or formulations are delivered to the eye by an eye drop, an ointment, a paste, a cream, a suspension, an emulsion, a fatty ointment, a gel, a bioadhesive gel, a powder, a lotion, a solution, or a spray.

[0157] In some embodiments, the recombinant nucleic acids, viruses, medicaments, and/or pharmaceutical compositions or formulations are administered once to the subject. In some embodiments, the recombinant nucleic acids, viruses, medicaments, and/or pharmaceutical compositions are administered at least twice (e.g., at least 2 times, at least 3 times, at least 4 times, at least 5 times, at least 10 times, etc.) to the subject. In some embodiments, at least about 1 hour (e.g., at least about 1 hour, at least about 6 hours, at least about 12 hours, at least about 18 hours, at least about 1 day, at least about 2 days, at least about 3 days, at least about 4 days, at least about 5 days, at least about 6 days, at least about 7 days, at least about 15 days, at least about 20 days, at least about 30 days, at least about 40 days, at least about 50 days, at least about 60 days, at least about 70 days, at least about 80 days, at least about 90 days, at least about 100 days, at least about 120 days, etc.) pass between administrations (e.g., between the first and second administrations, between the second and third administrations, etc.). In some embodiments, the recombinant nucleic acids, viruses, medicaments, and/or pharmaceutical compositions or formulations are administered one, two, three, four, five or more times per day to the subject. In some embodiments, the recombinant nucleic acids, viruses, medicaments, and/or pharmaceutical compositions or formulations are administered one, two, three, four, five or more times per month to the subject.

### VII. Host Cells

[0158] Certain aspects of the present disclosure relate to one or more host cells comprising any of the recombinant nucleic acids described herein. Any suitable host cell (prokaryotic or eukaryotic) known in the art may be used, including, for example: prokaryotic cells including eubacteria, such as Gram-negative or Gram-positive organisms, for example Enterobacteriaceae such as Escherichia (e.g., E. coli), Enterobacter, Erminia, Klebsiella, Proteus, Salmonella (e.g., S. typhimurium), Serratia (e.g., S. marcescans), and Shigella, as well as Bacilli such as B. subtilis and B. licheniformis; fungal cells (e.g., S. cerevisiae); insect cells (e.g., S2 cells, etc.); and mammalian cells, including monkey kidney CV1 line transformed by SV40 (COS-7, ATCC CRL 1651), human embryonic kidney line (293 or 293 cells subcloned for growth in suspension culture), baby hamster kidney cells (BHK, ATCC CCL 10), mouse Sertoli cells (TM4), monkey kidney cells (CV1 ATCC CCL 70), African green monkey kidney cells (VERO-76, ATCC CRL-1587), human cervical carcinoma cells (HELA, ATCC CCL 2), canine kidney cells (MDCK, ATCC CCL 34), buffalo rat liver cells (BRL 3A, ATCC CRL 1442), human lung cells (W138, ATCC CCL 75), human liver cells (Hep G2, HB 8065), mouse mammary tumor (MMT 060562, ATCC CCL51), TRI cells, MRC 5 cells, FS4 cells, human hepatoma line (Hep G2), Chinese hamster ovary (CHO) cells, including DHFR″ CHO cells, and myeloma cell lines such as NSO and Sp2/0. In some embodiments, the host cell is a human or non-human primate cell. In some embodiments, the host cells are cells from a cell line. Examples of suitable host cells or cell lines may include, but are not limited to, 293, HeLa, SH-Sy5y, Hep G2, CACO-2, A549, L929, 3T3, K562, CHO-K1, MDCK, HUVEC, Vero, N20, COS-7, PSN1, VCaP, CHO cells, and the like.

[0159] In some embodiments, the recombinant nucleic acid is a herpes simplex viral vector. In some embodiments, the recombinant nucleic acid is a herpes simplex virus amplicon. In some embodiments, the recombinant nucleic acid is an HSV-1 amplicon or HSV-1 hybrid amplicon. In some embodiments, a host cell comprising a helper virus is contacted with an HSV-1 amplicon or HSV-1 hybrid amplicon described herein, resulting in the production of a virus comprising one or more recombinant nucleic acids described herein. In some embodiments, the virus is collected from the supernatant of the contacted host cell. Methods of generating virus by contacting host cells comprising a helper virus with an HSV-1 amplicon or HSV-1 hybrid amplicon are known in the art.

[0160] In some embodiments, the host cell is a complementing host cell. In some embodiments, the complementing host cell expresses one or more genes that are inactivated in any of the viral vectors described herein. In some embodiments, the complementing host cell is contacted with a recombinant herpes virus genome (e.g., a recombinant herpes simplex virus genome) described herein. In some embodiments, contacting a complementing host cell with a recombinant herpes virus genome results in the production of a herpes virus comprising one or more recombinant nucleic acids described herein. In some embodiments, the virus is collected from the supernatant of the contacted host cell. Methods of generating virus by contacting complementing host cells with a recombinant herpes simplex virus are generally described in WO2015/009952, WO2017/176336, WO2019/200163, and/or WO2019/210219.

### VIII. Articles of Manufacture or Kits

[0161] Certain aspects of the present disclosure relate to an article of manufacture or a kit comprising any of the recombinant nucleic acids, viruses, medicaments, and/or pharmaceutical compositions or formulations described herein. In some embodiments, the article of manufacture or kit comprises a package insert comprising instructions for administering the recombinant nucleic acid, virus, medicament, and/or pharmaceutical composition or formulation.

[0162] Suitable containers for the recombinant nucleic acids, viruses, medicaments, and/or pharmaceutical compositions or formulations may include, for example, bottles, vials, bags, tubes, and syringes. The container may be formed from a variety of materials such as glass, plastic (such as polyvinyl chloride or polyolefin), or metal alloy (such as stainless steel or hastelloy). In some embodiments, the container comprises a label on, or associated with the container, wherein the label indicates directions for use. The article of manufacture or kit may further include other materials desirable from a commercial and user standpoint, including other buffers, diluents, filters, inhalers, nebulizers, intranasal administration devices, a package insert, and the like.

### IX. Enumerated Embodiments

[0163] Embodiment 1: a recombinant herpes virus genome comprising one or more polynucleotides encoding a polypeptide.
[0164] Embodiment 2: the recombinant herpes virus genome of embodiment 1, wherein the recombinant herpes virus genome is replication competent.
[0165] Embodiment 3: the recombinant herpes virus genome of embodiment 1 or 2, wherein the recombinant herpes virus genome is replication defective.
[0166] Embodiment 4: the recombinant herpes virus genome of any of embodiments 1-3, wherein the recombinant herpes virus genome is selected from the group consisting of a recombinant herpes simplex virus genome, a recombinant varicella zoster virus genome, a recombinant human cytomegalovirus genome, a recombinant herpesvirus 6A genome, a recombinant herpesvirus 6B genome, a recombinant herpesvirus 7 genome, a recombinant Epstein-Barr virus genome, a recombinant Kaposi's sarcoma-associated herpesvirus genome, and any derivatives thereof.
[0167] Embodiment 5: the recombinant herpes virus genome of any of embodiments 1-4, wherein the recombinant herpes virus genome is a recombinant herpes simplex virus genome.
[0168] Embodiment 6: the recombinant herpes virus genome of any of embodiments 1-5, wherein the recombinant herpes simplex virus genome is a recombinant herpes simplex virus type 1 (HSV-1) genome, a recombinant herpes simplex virus type 2 (HSV-2) genome, or any derivatives thereof.
[0169] Embodiment 7: the recombinant herpes virus genome of any of embodiments 1-6, wherein the recombinant herpes simplex virus genome is a recombinant herpes simplex virus type 1 (HSV-1) genome.
[0170] Embodiment 8: the recombinant herpes virus genome of any of embodiments 1-7, wherein the recombinant herpes simplex virus genome is a recombinant herpes simplex virus type 2 (HSV-2) genome.
[0171] Embodiment 9: the recombinant herpes virus genome of any of embodiments 1-8, wherein the recombinant herpes simplex virus genome has been engineered to reduce or eliminate expression of one or more toxic herpes simplex virus genes.
[0172] Embodiment 10: the recombinant herpes virus genome of any of embodiments 1-9, wherein the recombinant herpes simplex virus genome comprises an inactivating mutation.
[0173] Embodiment 11: the recombinant herpes virus genome of any of embodiments 1-10, wherein the inactivating mutation is in a herpes simplex virus gene.
[0174] Embodiment 12: the recombinant herpes virus genome of any of embodiments 1-11, wherein the inactivating mutation is a deletion of the coding sequence of the herpes simplex virus gene.
[0175] Embodiment 13: the recombinant herpes virus genome of any of embodiments 1-12, wherein the herpes simplex virus gene is selected from the group consisting of Infected Cell Protein (ICP) 0, ICP4, ICP22, ICP27, ICP47, thymidine kinase (tk), Long Unique Region (UL) 41, and UL55.
[0176] Embodiment 14: the recombinant herpes virus genome of any of embodiments 1-13, wherein the recombinant herpes simplex virus genome comprises an inactivating mutation in one or both copies of the ICP4 gene.
[0177] Embodiment 15: the recombinant herpes virus genome of any of embodiments 1-14, wherein the recombinant herpes simplex virus genome comprises an inactivating mutation in the ICP22 gene.
[0178] Embodiment 16: the recombinant herpes virus genome of any of embodiments 1-15, wherein the recombinant herpes simplex virus genome comprises an inactivating mutation in the UL41 gene.
[0179] Embodiment 17: the recombinant herpes virus genome of any of embodiments 1-16, wherein the recombinant herpes simplex virus genome comprises an inactivating mutation in one or both copies of the ICP0 gene.
[0180] Embodiment 18: the recombinant herpes virus genome of any of embodiments 1-17, wherein the recombinant herpes simplex virus genome comprises an inactivating mutation in the ICP27 gene.
[0181] Embodiment 19: the recombinant herpes virus genome of any of embodiments 1-18, wherein the recombinant herpes simplex virus genome comprises an inactivating mutation in the UL55 gene.
[0182] Embodiment 20: the recombinant herpes virus genome of any of embodiments 1-19, wherein the recombinant herpes simplex virus genome does not comprise an inactivating mutation in the ICP47 gene.
[0183] Embodiment 21: the recombinant herpes virus genome of any of embodiments 1-20, wherein the recombinant herpes simplex virus does not comprise an inactivating mutation in one or both copies of the ICP34.5 gene.
[0184] Embodiment 22: the recombinant herpes virus genome of any of embodiments 1-21, wherein the recombinant herpes simplex virus genome comprises the one or more polynucleotides encoding the polypeptide within one or both of the ICP4 viral gene loci.
[0185] Embodiment 23: the recombinant herpes virus genome of any of embodiments 1-22, wherein the recombinant herpes simplex virus genome comprises the one or more polynucleotides encoding the polypeptide within the ICP22 viral gene locus.
[0186] Embodiment 24: the recombinant herpes virus genome of any of embodiments 1-23, wherein the recombinant herpes simplex virus genome comprises the one or more polynucleotides encoding the polypeptide within the UL41 viral gene locus.
[0187] Embodiment 25: the recombinant herpes virus genome of any of embodiments 1-24, wherein the recombinant herpes simplex virus genome comprises the one or more polynucleotides encoding the polypeptide within one or both of the ICP0 viral gene loci.
[0188] Embodiment 26: the recombinant herpes virus genome of any of embodiments 1-25, wherein the recombinant herpes simplex virus genome comprises the one or more polynucleotides encoding the polypeptide within the ICP27 viral gene locus.
[0189] Embodiment 27: the recombinant herpes virus genome of any of embodiments 1-26, wherein the recombinant herpes simplex virus genome comprises the one or more polynucleotides encoding the polypeptide within the UL55 viral gene locus.
[0190] Embodiment 28: the recombinant herpes virus genome of any of embodiments 1-27, wherein the polypeptide is a human polypeptide.
[0191] Embodiment 29: the recombinant herpes virus genome of any of embodiments 1-28, wherein the polypeptide is selected from the group consisting of sterile alpha motif domain-containing protein 11, nephrocystin-4, espin, nicotinamide/nicotinic acid mononucleotide adenylyltransferase 1, mitofusin-2, ER membrane protein complex subunit 1, phospholipase A2 group V, dehydrodolichyl diphosphate synthase complex subunit, palmitoyl-protein thioesterase 1, elongation of very long chain fatty acids protein 1, Protein O-linked-mannose beta-1,2-N-acetylglucosaminyltransferase 1, Retinoid isomerohydrolase, Retinal-specific phospholipid-transporting ATPase, Collagen alpha-1 (XI), Guanine nucleotide-binding protein G(t) subunit alpha-2, Chloride channel CLIC-like protein 1, DNA damage-regulated autophagy modulator protein 2, U4/U6 small nuclear ribonucleoprotein Prp3, Alpha-endosulfine, Semaphorin-4A, Cyclic AMP-dependent transcription factor ATF-6 alpha, Hemicentin-1, Complement factor H, Protein crumbs homolog 1, Adiponectin receptor protein 1, Protein RD3, Serine/threonine-protein kinase Nek2, Feline leukemia virus subgroup C receptor-related protein 1, Usherin, Serologically defined colon cancer antigen 8, Olfactory receptor 2W3, NBAS subunit of NRZ tethering complex, Cytosolic carboxypeptidase-like protein 5, Zinc finger protein 513, Intraflagellar transport protein 172 homolog, Photoreceptor cilium actin regulator, EGF-containing fibulin-like extracellular matrix protein 1/TLE family member 5, Protein FAM161A, WD repeat-containing and planar cell polarity effector protein fritz homolog, Centrosome-associated protein ALMS1, U5 small nuclear ribonucleoprotein 200 kDa helicase, Metal transporter CNNM4, Cyclic nucleotide-gated cation channel alpha-3, Nephrocystin-1, Tyrosine-protein kinase Mer, Bardet-Biedl syndrome 5 protein, Ceramide kinase-like protein, Neurogenic differentiation factor 1, Transmembrane protein 237, Inward rectifier potassium channel 13, S-arrestin, Secreted phosphoprotein 24, CCA tRNA nucleotidyltransferase 1, mitochondrial, Sodium bicarbonate cotransporter 3, Leucine zipper transcription factor-like protein 1, Guanine nucleotide-binding protein G(t) subunit alpha-1, Three-prime repair exonuclease 1, MAP kinase-activated protein kinase 3, Ataxin-7, Vitamin K-dependent protein S, ADP-ribosylation factor-like protein 6, Interphotoreceptor matrix proteoglycan 2, IQ calmodulin-binding motif-containing protein 1, Rhodopsin, Nephrocystin-3, Clarin-1, Probable cationic amino acid transporter/Solute carrier family 7 member 14, Choline-phosphate cytidylyltransferase A, Centrosomal protein of 19 kDa, Rod cGMP-specific 3′,5′-cyclic phosphodiesterase subunit beta, Wolframin, Homeobox protein HMX1, Ras-related protein Rab-28, Coiled-coil and C2 domain-containing protein 2A, Prominin-1, Adhesion G protein-coupled receptor A3, Death domain-containing protein 1, WD repeat-containing protein 19, cGMP-gated cation channel alpha-1, CDGSH iron-sulfur domain-containing protein 2, Microsomal triglyceride transfer protein large subunit, Leucine-rich repeat, immunoglobulin-like domain and transmembrane domain-containing protein 3, Bardet-Biedl syndrome 7 protein, Bardet-Biedl syndrome 12 protein, Major facilitator superfamily domain-containing protein 8, Serine/threonine-protein kinase PLK4, Lecithin retinol acyltransferase, Toll-like receptor 3, Cytochrome P450 4V2, Spliceosome-associated protein CWC27 homolog, Centrosomal protein POC5, Versican core protein, Adhesion G-protein coupled receptor V1, COUP transcription factor 1, Mitochondrial outer membrane protein SLC25A46, Catenin alpha-1, Histidine-tRNA ligase, cytoplasmic, Rod cGMP-specific 3′,5′-cyclic phosphodiesterase subunit alpha, Metabotropic glutamate receptor 6, Serine/threonine-protein kinase MAK, Complement C2, Complement factor B, Tubby-related protein 1, Guanylyl cyclase-activating protein 1, Guanylyl cyclase-activating protein 2, Peripherin-2, Interphotoreceptor matrix proteoglycan 1, Protein eyes shut homolog, Collagen alpha-1 (IX) chain, Regulating synaptic membrane exocytosis protein 1, Lebercilin, Elongation of very long chain fatty acids protein 4, PR domain zinc finger protein 13, Reticulon-4-interacting protein 1, mitochondrial, Jouberin, Peroxisomal targeting signal 2 receptor, CCR4-NOT transcription complex subunit 9, Aryl hydrocarbon receptor, Kelch-like protein 7, Retinitis pigmentosa 9 protein, Protein PTHB1, Peroxisomal ATPase PEX1, Tetraspanin-12, Inosine-5′-monophosphate dehydrogenase 1, Short-wave-sensitive opsin 1, UPF0606 protein KIAA1549, Retinitis pigmentosa 1-like 1 protein, Disintegrin and metalloproteinase domain-containing protein 9, Heparan-alpha-glucosaminide N-acetyltransferase, Oxygen-regulated protein 1, Alpha-tocopherol transfer protein, Centrosome and spindle pole-associated protein 1, Dynamin-like 120 kDa protein, mitochondrial, Peroxisome biogenesis factor 2, Cyclic nucleotide-gated cation channel beta-3, Cilia- and flagella-associated protein 418, Growth/differentiation factor 6, Regulating synaptic membrane exocytosis protein 2, Potassium voltage-gated channel subfamily V member 2, E3 ubiquitin-protein ligase Topors, Centrosomal protein of 78 kDa, Inversin, U4/U6 small nuclear ribonucleoprotein Prp4, Whirlin, E3 ubiquitin-protein ligase TRIM32, Toll-like receptor 4, Cytoplasmic dynein 2 intermediate chain 2, Programmed cell death protein 2, Exosome complex component RRP4, Phosphatidylinositol polyphosphate 5-phosphatase type IV, Phytanoyl-CoA dioxygenase, peroxisomal, Acyl-CoA-binding domain-containing protein, Protocadherin-15, Retinol-binding protein 3, DNA excision repair protein ERCC-6, Hexokinase-1, Cadherin-23, Cadherin-related family member 1, RPE-retinal G protein-coupled receptor, Kinesin-like protein KIF11, Retinol-binding protein 4, Cone cGMP-specific 3′,5′-cyclic phosphodiesterase subunit alpha, Paired box protein Pax-2, PDZ domain-containing protein 7, ADP-ribosylation factor-like protein 3, BBSome-interacting protein 1, Age-related maculopathy susceptibility protein 2, Serine protease HTRA1, Ornithine aminotransferase, mitochondrial, Zinc finger protein 408, Tubby protein homolog, Transcriptional enhancer factor TEF-1, Harmonin, Transmembrane protein 216, Bestrophin-1, Isoaspartyl peptidase/L-asparaginase, Rod outer segment membrane protein 1, Bardet-Biedl syndrome 1 protein, Calcium-binding protein 4, Low-density lipoprotein receptor-related protein 5, Calpain-5, Unconventional myosin-VIIa, Transmembrane protein 126A, Frizzled-4, Cytoplasmic dynein 2 light intermediate chain 1, Centrosomal protein of 164 kDa, Complement C1q tumor necrosis factor-related protein 5, Membrane frizzled-related protein, Voltage-dependent calcium channel subunit alpha-2/delta-4, Guanine nucleotide-binding protein G(I)/G(S)/G(T) subunit beta-3, Retinal cone rhodopsin-sensitive cGMP 3′,5′-cyclic phosphodiesterase subunit gamma, Collagen alpha-1 (II) chain, Matrix metalloproteinase-19, Retinol dehydrogenase 5, T-complex protein 1 subunit beta, Bardet-Biedl syndrome 10 protein, Centrosomal protein of 290 kDa, POC1 centriolar protein homolog B, Mevalonate kinase, Intraflagellar transport protein 81 homolog, Mitochondrial translation release factor in rescue, Integral membrane protein 2B, Retinoblastoma-associated protein, RCC1 and BTB domain-containing protein 1, Rhodopsin kinase GRK1, X-linked retinitis pigmentosa GTPase regulator-interacting protein 1, Neural retina-specific leucine zipper protein, Homeobox protein OTX2, Retinol dehydrogenase 11, Retinol dehydrogenase 12, Tubulin polyglutamylase TTLL5, Spermatogenesis-associated protein 7, Tetratricopeptide repeat protein 8, Fibulin-5, Transient receptor potential cation channel subfamily M member 1, Gamma-tubulin complex component 4, Sodium/potassium/calcium exchanger 1, Photoreceptor-specific nuclear receptor, Bardet-Biedl syndrome 4 protein, Calcium and integrin-binding family member 2, Retinaldehyde-binding protein 1, N-acetylglucosamine-1-phosphotransferase subunit gamma, Intraflagellar transport protein 140 homolog, Clusterin-associated protein 1, ATP-binding cassette sub-family C member 6, Ketimine reductase mu-crystallin, Battenin, Zinc finger protein 423, Protein fantom, Bardet-Biedl syndrome 2 protein, ADP-ribosylation factor-like protein 2-binding protein, Cyclic nucleotide-gated cation channel beta-1, Cadherin-3, Pre-mRNA-splicing factor ATP-dependent RNA helicase PRP16, A disintegrin and metalloproteinase with thrombospondin motifs 18, Solute carrier family 38 member 8, Retinal guanylyl cyclase 1, Pre-mRNA-processing-splicing factor 8, Aryl-hydrocarbon-interacting protein-like 1, Membrane-associated phosphatidylinositol transfer protein 3, Protein unc-119 homolog A, Probable G-protein coupled receptor 179, Tectonic-like complex member MKS1, Carbonic anhydrase 4, Regulator of G-protein signaling 9, Arylsulfatase G, pre-mRNA splicing regulator USH1G, Photoreceptor disk component PRCD, Fascin-2, Retinal rod rhodopsin-sensitive cGMP 3′,5′-cyclic phosphodiesterase subunit gamma, Laminin subunit alpha-1, AFG3-like protein 2, Cone-rod homeobox protein, Receptor expression-enhancing protein 6, Retina and anterior neural fold homeobox protein 2, Complement C3, Rho guanine nucleotide exchange factor 18, Patatin-like phospholipase domain-containing protein 6, Regulator of G-protein signaling 9-binding protein, Optic atrophy 3 protein, U4/U6 small nuclear ribonucleoprotein Prp31, Isocitrate dehydrogenase [NAD] subunit beta, mitochondrial, Pantothenate kinase 2, mitochondrial, Protein jagged-1, Molecular chaperone MKKS, Centrosomal protein kizuna, Lysophosphatidylserine lipase ABHD12, Kinesin-like protein KIF3B, Centrosome-associated protein CEP250, Pre-mRNA-processing factor 6, Cilia- and flagella-associated protein 410, Dynamin-1-like protein, Metalloproteinase inhibitor 3, Intraflagellar transport protein 27 homolog, Fibulin-1, MIEF1 upstream open reading frame protein, Aconitate hydratase, mitochondrial, Gamma-tubulin complex component 6, Centriole and centriolar satellite protein, Retinoschisin, Protein XRP2, Dystrophin, X-linked retinitis pigmentosa GTPase regulator, Nyctalopin, Xaa-Pro dipeptidase, Norrin, Voltage-dependent L-type calcium channel subunit alpha-1F, Phosphoglycerate kinase 1, Rab proteins geranylgeranyltransferase component A 1, Mitochondrial import inner membrane translocase subunit Tim8 A, Ribose-phosphate pyrophosphokinase 1, Long-wave-sensitive opsin 1, Medium-wave-sensitive opsin 1, Short-wave-sensitive opsin 1, Transcription factor A, mitochondrial, NADH-ubiquinone oxidoreductase chain 1, NADH-ubiquinone oxidoreductase chain 2, NADH-ubiquinone oxidoreductase chain 3, NADH-ubiquinone oxidoreductase chain 4L, NADH-ubiquinone oxidoreductase chain 4, NADH-ubiquinone oxidoreductase chain 5, NADH-ubiquinone oxidoreductase chain 6, ATP synthase subunit a, ATP synthase protein 8, Cytochrome c oxidase subunit 1, Cytochrome c oxidase subunit 3, Cytochrome b, Leucine-tRNA ligase, mitochondrial, Nondiscriminating glutamyl-tRNA synthetase EARS2, mitochondrial, Lysine-tRNA ligase, Histidine-tRNA ligase, mitochondrial, Serine-tRNA ligase, mitochondrial, Probable proline-tRNA ligase, mitochondrial, Cyanocobalamin reductase/alkylcobalamin dealkylase, POU domain, class 3, transcription factor 4, Ribosomal protein S6 kinase alpha-6, Ciliogenesis and planar polarity effector 1, Meckelin, TRAF3-interacting protein 1, Intraflagellar transport protein 74 homolog, S phase cyclin A-associated protein in the endoplasmic reticulum, Sodium channel and clathrin linker 1, Protein TALPID3, Tectonic-2, ADP-ribosylation factor-like protein 13B, B9 domain-containing protein 1, B9 domain-containing protein 2, C2 domain-containing protein 3, Centrosomal protein of 41 kDa, Centrosomal protein of 104 kDa, Centrosomal protein of 120 kDa, Intraflagellar transport protein 172 homolog, Katanin-interacting protein, Kinesin-like protein KIF7, Retinal rod rhodopsin-sensitive cGMP 3′,5′-cyclic phosphodiesterase subunit delta, Tectonic-1, Tectonic-3, Transmembrane protein 107, Transmembrane protein 138, Transmembrane protein 231, Tetratricopeptide repeat protein 21B, Nuclear receptor ROR-alpha, Beta-nerve growth factor, Collagen alpha-2 (VIII) chain, Solute carrier family 4 member 11, Zinc finger E-box-binding homeobox 1, Keratin, type II cuticular Hb3, Keratin, type I cytoskeletal 12, Transforming growth factor-beta-induced protein ig-h3, Tumor-associated calcium signal transducer 2, Carbohydrate sulfotransferase 6, Gelsolin, UbiA prenyltransferase domain-containing protein 1, Decorin, 1-phosphatidylinositol 3-phosphate 5-kinase, Transcription factor Ovo-like 2, and Grainyhead-like protein 2 homolog.
[0192] Embodiment 30: the recombinant herpes virus genome of any of embodiments 1-29, wherein the polypeptide comprises a sequence having at least 80%, at least 85%, at least 90%, at least 91%, at least 92%, at least 93%, at least 94%, at least 95%, at least 96%, at least 97%, at least 98%, at least 99%, or 100% sequence identity to the amino acid sequence selected from the group consisting of SEQ ID NOS: 21-377 and SEQ ID NOs: 739-740.
[0193] Embodiment 31: the recombinant herpes virus genome of any of embodiments 1-30, wherein the polypeptide is beta-nerve growth factor, retinal-specific phospholipid-transporting ATPase, or centrosomal protein of 290 kDa.
[0194] Embodiment 32: the recombinant herpes virus genome of any of embodiments 1-31, wherein the polypeptide is beta-nerve growth factor.
[0195] Embodiment 33: the recombinant herpes virus genome of any of embodiments 1-32, wherein the beta-nerve growth factor comprises a sequence having at least 80%, at least 85%, at least 90%, at least 91%, at least 92%, at least 93%, at least 94%, at least 95%, at least 96%, at least 97%, at least 98%, at least 99%, or 100% sequence identity to the amino acid sequence of SEQ ID NO: 363, SEQ ID NO: 739, or SEQ ID NO: 740.
[0196] Embodiment 34: the recombinant herpes virus genome of any of embodiments 1-33, wherein the polypeptide is retinal-specific phospholipid-transporting ATPase.
[0197] Embodiment 35: the recombinant herpes virus genome of any of embodiments 1-34, wherein the retinal-specific phospholipid-transporting ATPase comprises a sequence having at least 80%, at least 85%, at least 90%, at least 91%, at least 92%, at least 93%, at least 94%, at least 95%, at least 96%, at least 97%, at least 98%, at least 99%, or 100% sequence identity to the amino acid sequence of SEQ ID NO: 33.
[0198] Embodiment 36: the recombinant herpes virus genome of any of embodiments 1-35, wherein the polypeptide is centrosomal protein of 290 kDa.
[0199] Embodiment 37: the recombinant herpes virus genome of any of embodiments 1-36, wherein the centrosomal protein of 290 kDa comprises a sequence having at least 80%, at least 85%, at least 90%, at least 91%, at least 92%, at least 93%, at least 94%, at least 95%, at least 96%, at least 97%, at least 98%, at least 99%, or 100% sequence identity to the amino acid sequence of SEQ ID NO: 219.
[0200] Embodiment 38: the recombinant herpes virus genome of any of embodiments 1-37, wherein the recombinant herpes virus genome has reduced cytotoxicity when introduced into a target cell as compared to a corresponding wild-type herpes virus genome.
[0201] Embodiment 39: the recombinant herpes virus genome of any of embodiments 1-38, wherein the target cell is a human cell.
[0202] Embodiment 40: the recombinant herpes virus genome of any of embodiments 1-39, wherein the target cell is a cell of the eye.
[0203] Embodiment 41: the recombinant herpes virus genome of any of embodiments 1-40, wherein the target cell is a rod cell, a cone cell, a retinal ganglion cell, a bipolar cell, a horizontal cell, a muller cell, or an amacrine cell.
[0204] Embodiment 42: a herpes virus comprising the recombinant herpes virus genome of any one of embodiment 1-41.
[0205] Embodiment 43: the herpes virus of embodiment 42, wherein the herpes virus is replication competent.
[0206] Embodiment 44: the herpes virus of embodiment 42 or 43, wherein the herpes virus is replication defective.
[0207] Embodiment 45: the herpes virus of any of embodiments 42-44, wherein the herpes virus has reduced cytotoxicity as compared to a corresponding wild-type herpes virus.
[0208] Embodiment 46: the herpes virus of any of embodiments 42-45, wherein the herpes virus is selected from the group consisting of a herpes simplex virus, a varicella zoster virus, a human cytomegalovirus, a herpesvirus 6A, a herpesvirus 6B, a herpesvirus 7, an Epstein-Barr virus, and a Kaposi's sarcoma-associated herpesvirus.
[0209] Embodiment 47: the herpes virus of any of embodiments 42-46, wherein the herpes virus is a herpes simplex virus.
[0210] Embodiment 48: the herpes virus of any of embodiments 42-47, wherein the herpes simplex virus is a herpes simplex virus type 1 (HSV-1), a herpes simplex virus type 2 (HSV-2), or any derivatives thereof.
[0211] Embodiment 49: the herpes virus of any of embodiments 42-48, wherein the herpes simplex virus is a herpes simplex virus type 1 (HSV-1).
[0212] Embodiment 50: the herpes virus of any of embodiments 42-49, wherein the herpes simplex virus is a herpes simplex virus type 2 (HSV-2).
[0213] Embodiment 51: a pharmaceutical composition comprising the recombinant herpes virus genome of any of embodiments 1-41 or the herpes virus of any of embodiments 42-50 and a pharmaceutically acceptable excipient.
[0214] Embodiment 52: the pharmaceutical composition of embodiment 51, wherein the pharmaceutical composition is suitable for ocular, subretinal, intraocular, intravitreal, topical, subcutaneous, subconjunctival, subtenon, subtenon capsule, intracameral, retrobulbar, systemic, parenteral, periocular, juxtascleral, anterior juxtascleral, posterior juxtascleral, oral, peribulbar, or suprachoroidal administration.
[0215] Embodiment 53: the pharmaceutical composition of embodiment 51 or 52, wherein the pharmaceutical composition is suitable for intraocular, subretinal, intravitreal, suprachoroidal, or topical administration.
[0216] Embodiment 54: the pharmaceutical composition of any of embodiments 51-53, wherein the pharmaceutical composition is suitable for topical administration.
[0217] Embodiment 55: the pharmaceutical composition of any of embodiments 51-54, wherein the pharmaceutical composition is suitable for suprachoroidal administration.
[0218] Embodiment 56: the pharmaceutical composition of any of embodiments 51-55, wherein the pharmaceutical composition is suitable for use in an eyedrop, an ointment, a paste, a cream, a suspension, an emulsion, a fatty ointment, a gel, a bioadhesive gel, a powder, a lotion, a solution, a spray or any combinations thereof.
[0219] Embodiment 57: the pharmaceutical composition of any of embodiments 51-56, wherein the herpes virus or pharmaceutical composition is formulated as an eye drop, an ointment, a paste, a cream, a suspension, an emulsion, a fatty ointment, a gel, a bioadhesive gel, a powder, a lotion, a solution, or a spray.
[0220] Embodiment 58: the herpes virus of any of embodiments 42-50 or the pharmaceutical composition of any of embodiments 51-57 for use as a medicament.
[0221] Embodiment 59: the herpes virus of any of embodiments 42-50 or the pharmaceutical composition of any of embodiments 51-57 for use in a therapy.
[0222] Embodiment 60: the herpes virus of any of embodiments 42-50 or the pharmaceutical composition of any of embodiments 51-57, wherein the herpes virus or the pharmaceutical composition is for use in the treatment of an eye condition or disease.
[0223] Embodiment 61: the herpes virus of any of embodiments 42-50 or the pharmaceutical composition of any of embodiments 51-57, wherein the eye condition or disease is selected from the group consisting of retinitis pigmentosa, recessive retinitis pigmentosa, severe recessive retinitis pigmentosa, dominant retinitis pigmentosa, dominant retinitis pigmentosa with choroidal involvement, recessive retinitis pigmentosa with para-arteriolar preservation of the RPE (PPRPE), recessive retinitis pigmentosa with posterior column ataxia (PCARP), recessive retinitis pigmentosa with erythrocytic microcytosis, syndromic recessive retinitis pigmentosa, recessive syndromic disease with retinitis pigmentosa, non-syndromic recessive retinitis pigmentosa, non-syndromic dominant retinitis pigmentosa, syndromic dominant retinitis pigmentosa, juvenile recessive retinitis pigmentosa, recessive retinitis pigmentosa and mental retardation, recessive retinitis pigmentosa with macular degeneration, severe early-onset recessive retinitis pigmentosa, recessive retinitis pigmentosa and skeletal anomalies, recessive retinitis pigmentosa and skeletal abnormalities, dominant retinitis pigmentosa with sensorineural deafness, recessive retinitis pigmentosa with hearing loss, recessive retinitis pigmentosa with hearing loss and additional disabilities, recessive retinitis pigmentosa with vitreal alterations, early onset with macular coloboma recessive retinitis pigmentosa, X-linked retinitis pigmentosa, recessive X-linked retinitis pigmentosa, dominant X-linked retinitis pigmentosa, severe X-linked retinitis pigmentosa, X-linked retinitis pigmentosa with mental retardation, X-linked retinitis pigmentosa with myopathy, Bardet-Biedl like retinitis pigmentosa, Bardet-Biedl like recessive retinitis pigmentosa, digenic retinitis pigmentosa, digenic retinitis pigmentosa with retinal outer segment membrane protein 1, digenic retinitis pigmentosa with PRPH2, recessive retinitis pigmentosa with early macular involvement, recessive deafness without retinitis pigmentosa, recessive congenital deafness without retinitis pigmentosa, recessive retinitis pigmentosa and recessive ataxia, recessive retinitis pigmentosa and dominant ataxia, mitochondrial retinitis pigmentosa, mitochondrial retinitis pigmentosa with developmental and neurological abnormalities, mitochondrial retinitis pigmentosa with progressive sensorineural hearing loss, mitochondrial retinitis pigmentosa with deafness and neurological abnormalities, Autosomal Dominant Retinitis Pigmentosa, Nonsyndromic Autosomal Dominant Retinitis Pigmentosa, Autosomal Recessive, Retinitis Pigmentosa, Nonsyndromic Autosomal Recessive Retinitis Pigmentosa, Retinal pigment epithelium (RPE), recessive RPE, dominant RPE, recessive RPE degeneration, dominant RPE degeneration, ataxia, recessive ataxia, dominant ataxia, Senior-Loken syndrome, recessive Senior-Loken syndrome, dominant Senior-Loken syndrome, nephronophthisis, recessive nephronophthisis, dominant nephronophthisis, adolescent recessive nephronophthisis, ciliopathy-related recessive nephronophthisis, juvenile nephronophthisis, juvenile recessive nephronophthisis, juvenile dominant nephronophthisis, Usher syndrome, Usher syndrome type I, Usher syndrome type II, Usher syndrome type III, recessive Usher syndrome, atypical recessive Usher syndrome, dominant Usher syndrome, type 2 recessive Usher syndrome, type 2a recessive Usher syndrome, type 3 recessive Usher syndrome, type 3-like recessive Usher syndrome, atypical recessive Usher syndrome, type 1 recessive Usher syndrome, type 1b recessive Usher syndrome, type 1d recessive Usher syndrome, type 1f recessive Usher syndrome, type 1J recessive Usher syndrome, type 1k recessive Usher syndrome, digenic Usher syndrome with CDH23, digenic Usher syndrome with PCDH15, Acadian recessive Usher syndrome, recessive atypical Usher syndrome (USH3-like), Leber congenital amaurosis, recessive Leber congenital amaurosis, dominant Leber congenital amaurosis, de novo Leber congenital amaurosis, dominant Leber congenital amaurosis and pituitary dysfunction, recessive Leber congenital amaurosis with myopathy, recessive Leber congenital amaurosis with severe childhood retinal dystrophy, mitochondrial Leber hereditary optic neuropathy, Leber hereditary optic neuropathy, optic atrophy, recessive optic atrophy, dominant optic atrophy, optic atrophy with ataxia, recessive optic atrophy with ataxia, dominant optic atrophy with ataxia, recessive optic atrophy with ataxia and 3-methylglutaconic aciduria, dominant optic atrophy with cataract, ataxia and areflexia, Kjer type dominant optic atrophy, dominant optic atrophy with sensorineural hearing loss, recessive cerebellar degeneration with optic atrophy, optic atrophy with deadness-dystonia syndrome, X-linked optic atrophy with deadness-dystonia syndrome, retinal dystrophy, recessive retinal dystrophy, dominant retinal dystrophy, inherited retinal dystrophy, early onset recessive retinal dystrophy, recessive syndromic retinal dystrophy, recessive non-syndromic retinal dystrophy, recessive syndromic and non-syndromic retinal dystrophy, recessive optic atrophy and retinal dystrophy, recessive retinal dystrophy and obesity, recessive retinal dystrophy and cerebellar dysplasia, syndromic recessive optic atrophy and retinal dystrophy, dominant retinal dystrophy with iris coloboma, spectrum of ciliopathies including retinal dystrophy, recessive spectrum of ciliopathies including retinal dystrophy, dominant spectrum of ciliopathies including retinal dystrophy, dominant optic atrophy with neuropathy and myopathy, dominant optic atrophy with intellectual disability and developmental delay, syndromic optic atrophy, non-syndromic optic atrophy, recessive non-syndromic optic atrophy, dominant non-syndromic optic atrophy, recessive syndromic optic atrophy, dominant syndromic optic atrophy, Charcot-Marie-Tooth disease, recessive Charcot-Marie-Tooth disease, dominant Charcot-Marie-Tooth disease, benign fleck retina, recessive benign fleck retina, dominant benign fleck retina, syndromic retinopathy, recessive syndromic retinopathy, dominant syndromic retinopathy, Batten disease, recessive Batten disease, dominant Batten disease, recessive Batten disease (ceroid-lipofuscinosis, neuronal 3), juvenile recessive Batten disease (ceroid-lipofuscinosis, neuronal 3), neuronal ceroid lipofuscinosis, recessive neuronal ceroid lipofuscinosis, recessive neuronal ceroid lipofuscinosis 1, dominant neuronal ceroid lipofuscinosis, Stargardt disease, recessive Stargardt disease, dominant Stargardt disease, juvenile Stargardt disease, late onset Stargardt disease, Stargardt-like macular dystrophy, recessive Stargardt-like macular dystrophy, dominant Stargardt-like macular dystrophy, macular dystrophy, recessive macular dystrophy, early onset macular dystrophy, adult onset macular dystrophy, early onset recessive macular dystrophy, adult onset recessive macular dystrophy, early adult onset recessive macular dystrophy, juvenile with hypotrichosis recessive macular dystrophy, dominant macular dystrophy, late onset dominant macular dystrophy, dominant macular dystrophy with lens zonules, bull's-eye dominant macular dystrophy, butterfly-shaped dominant macular dystrophy, age-related dominant macular dystrophy, benign concentric annular dominant macular dystrophy, vitelliform recessive macular dystrophy, vitelliform dominant macular dystrophy, atypical vitelliform dominant macular dystrophy, dominant adult vitelliform macular dystrophy, Stargardt-like dominant macular dystrophy, Stargardt type dominant macular dystrophy, North Carolina dominant macular dystrophy, North Carolina-like dominant macular dystrophy, North Carolina-like with progressive sensorineural hearing loss dominant macular dystrophy, cystoid dominant macular dystrophy, Best type dominant macular dystrophy, occult macular dystrophy, recessive occult macular dystrophy, dominant occult macular dystrophy, age-related familial macular dystrophy, X-linked atrophic macular dystrophy, recessive X-linked atrophic macular dystrophy, dominant X-linked atrophic macular dystrophy, mitochondrial macular pattern dystrophy with type II diabetes and deafness, fundus flavimaculatus, recessive fundus flavimaculatus, dominant fundus flavimaculatus, rod dystrophy, recessive rod dystrophy, dominant rod dystrophy, cone dystrophy, recessive cone dystrophy, dominant cone dystrophy, recessive cone dystrophy with supernormal rod electroretinogram, early onset recessive cone dystrophy, late onset recessive cone dystrophy, cone dystrophy 1, X-linked cone dystrophy 1, cone dystrophy 2, progressive cone dystrophy 2, X-linked progressive cone dystrophy 2, delayed cone adaptation, recessive delayed cone adaptation, dominant delayed cone adaptation, cone-rod dystrophy, recessive cone-rod dystrophy, dominant cone-rod dystrophy, isolated cone-rod dystrophy, progressive cone-rod dystrophy, X-linked cone-rod dystrophy, X-linked progressive cone-rod dystrophy, progressive dominant cone-rod dystrophy, cone-rod dystrophy and amelogenesis imperfecta syndrome, recessive cone-rod dystrophy and amelogenesis imperfecta syndrome, dominant cone-rod dystrophy and amelogenesis imperfecta syndrome, recessive cone-rod dystrophy with inner retinopathy, recessive cone-rod dystrophy with skeletal disease, congenital syndromic nonprogressive recessive cone-rod dystrophy, recessive cone-rod dystrophy with hearing loss, recessive cone-rod dystrophy with psychomotor delay, recessive cone and cone-rod dystrophy, cone-rod synaptic disease, congenital cone-rod synaptic disease, recessive congenital cone-rod synaptic disease, dominant congenital cone-rod synaptic disease, rod-cone dystrophy, recessive rod-cone dystrophy, dominant rod-cone dystrophy, early onset recessive rod-cone dystrophy, non-syndromic recessive rod-cone dystrophy, recessive Newfoundland rod-cone dystrophy, recessive progressive cone dystrophy, Stickler syndrome, dominant Stickler syndrome, recessive Stickler syndrome, dominant Stickler syndrome type I, dominant Stickler syndrome type II, Marshall syndrome, dominant Marshall syndrome, recessive Marshall syndrome, achromatopsia, recessive achromatopsia, dominant achromatopsia, recessive complete achromatopsia, recessive incomplete achromatopsia, macular degeneration, age-related macular degeneration, complex etiology age-related macular degeneration, isolated age-related macular degeneration, wet age-related macular degeneration, dry age-related macular degeneration, drusen, recessive drusen, dominant drusen, early-onset recessive drusen, early-onset dominant drusen, macular drusen, dominant radial macular drusen, pigmented paravenous chorioretinal atrophy, recessive pigmented paravenous chorioretinal atrophy, dominant pigmented paravenous chorioretinal atrophy, progressive Bifocal Chorioretinal Atrophy, Bardet-Biedl syndrome, recessive Bardet-Biedl syndrome, dominant Bardet-Biedl syndrome, recessive Bardet-Biedl syndrome with developmental anomalies, retinal degeneration, recessive retinal degeneration, dominant retinal degeneration, non-syndromic recessive retinal degeneration, Doyne honeycomb retinal degeneration, recessive Doyne honeycomb retinal degeneration, dominant Doyne honeycomb retinal degeneration (Malattia Leventinese), recessive nephronophthisis with retinal degeneration, Alström syndrome, recessive Alström syndrome, dominant Alström syndrome, Joubert syndrome, recessive Joubert syndrome, dominant Joubert syndrome, Jobert syndrome, recessive Jobert syndrome, dominant Jobert syndrome, X-linked Jobert syndrome, vitreoretinal degeneration, recessive vitreoretinal degeneration, dominant vitreoretinal degeneration, snowflake vitreoretinal degeneration, snowflake dominant vitreoretinal degeneration, Oguchi disease, recessive Oguchi disease, dominant Oguchi disease, night blindness, stationary night blindness, congenital night blindness, congenital stationary night blindness, severe congenital stationary night blindness, recessive congenital stationary night blindness, recessive complete congenital stationary night blindness, dominant congenital stationary night blindness, Nougaret type dominant congenital stationary night blindness, Oguchi type recessive congenital stationary night blindness, Riggs type recessive congenital stationary night blindness, Schubert-Bornschein type recessive congenital stationary night blindness, fundus albipunctatus type recessive congenital stationary night blindness, complete recessive congenital stationary night blindness, X-linked congenital stationary night blindness, incomplete X-linked congenital stationary night blindness, retinal vasculopathy, cerebral leukodystrophy, retinal vasculopathy with cerebral leukodystrophy, recessive retinal vasculopathy with cerebral leukodystrophy, dominant retinal vasculopathy with cerebral leukodystrophy, Aicardi-Goutiere syndrome, Aicardi-Goutiere syndrome 1, recessive Aicardi-Goutiere syndrome 1, dominant Aicardi-utiere syndrome 1, chilblain lupus, recessive chilblain lupus, dominant chilblain lupus, Martinique retinal dystrophy and retinitis pigmentosa, recessive Martinique retinal dystrophy and retinitis pigmentosa, dominant Martinique retinal dystrophy and retinitis pigmentosa, spinocerebellar ataxia, recessive spinocerebellar ataxia, dominant spinocerebellar ataxia, spinocerebellar ataxia with macular dystrophy, spinocerebellar ataxia with retinal degeneration, spinocerebellar ataxia with macular dystrophy or retinal degeneration, recessive spinocerebellar ataxia with macular dystrophy or retinal degeneration, dominant spinocerebellar ataxia with macular dystrophy or retinal degeneration, Wolfram syndrome, recessive Wolfram syndrome, dominant Wolfram syndrome, low frequency sensorineural hearing loss, recessive low frequency sensorineural hearing loss, dominant low frequency sensorineural hearing loss, oculoauricular syndrome, recessive oculoauricular syndrome, dominant oculoauricular syndrome, recessive renal, skeletal and retinal anomalies, recessive abetalipoproteinemia, microcephaly, recessive microcephaly, dominant microcephaly, growth failure and retinopathy recessive microcephaly, Bietti crystalline corneoretinal dystrophy, recessive Bietti crystalline corneoretinal dystrophy, dominant Bietti crystalline corneoretinal dystrophy, Wagner disease, erosive vitreoretinopathy, Wagner disease and erosive vitreoretinopathy, recessive Wagner disease and erosive vitreoretinopathy, dominant Wagner disease and erosive vitreoretinopathy, febrile convulsions, recessive febrile convulsions, dominant febrile convulsions, dominant/recessive febrile convulsions, choroidal dystrophy, recessive choroidal dystrophy, dominant choroidal dystrophy, central areolar choroidal dystrophy, dominant central areolar choroidal dystrophy, recessive central areolar choroidal dystrophy, epiphyseal dysplasia, recessive epiphyseal dysplasia, dominant epiphyseal dysplasia, multiple epiphyseal dysplasia, recessive multiple epiphyseal dysplasia, dominant multiple epiphyseal dysplasia, ichthyosis, recessive ichthyosis, dominant ichthyosis, quadriplegia and retardation recessive ichthyosis, chorioretinal atrophy, bifocal chorioretinal atrophy, progressive bifocal chorioretinal atrophy, recessive progressive bifocal chorioretinal atrophy, dominant progressive bifocal chorioretinal atrophy, Refsum disease, recessive Refsum disease, dominant Refsum disease, adult form recessive Refsum disease, infantile form recessive Refsum disease, retinal-cone dystrophy, recessive retinal-cone dystrophy, dominant retinal-cone dystrophy, retinal-cone dystrophy 1, recessive retinal-cone dystrophy 1, dominant retinal-cone dystrophy 1, tritanopia, recessive tritanopia, dominant tritanopia, mucopolysaccharidosis, recessive mucopolysaccharidosis, dominant mucopolysaccharidosis, achromatopsia Pingelapese, recessive achromatopsia Pingelapese, dominant achromatopsia Pingelapese, Klippel-Feil syndrome, recessive Klippel-Feil syndrome, dominant Klippel-Feil syndrome, microphthalmia, recessive microphthalmia, dominant microphthalmia, limb-girdle muscular dystrophy, recessive limb-girdle muscular dystrophy, dominant limb-girdle muscular dystrophy, short-rib thoracic dysplasia, recessive short-rib thoracic dysplasia, dominant short-rib thoracic dysplasia, polydactyly recessive short-rib thoracic dysplasia, retinal dystrophy recessive short-rib thoracic dysplasia, mental retardation, truncal obesity, retinal dystrophy, and micropenis (MORM) syndrome, recessive MORM syndrome, dominant MORM syndrome, spasticity and retinal degeneration recessive retardation, Cockayne syndrome, recessive Cockayne syndrome, dominant Cockayne syndrome, congenital retinal nonattachment, recessive nonsyndromal congenital retinal nonattachment, dominant nonsyndromal congenital retinal nonattachment, hemolytic anemia, nonspherocytic hemolytic anemia, recessive nonspherocytic hemolytic anemia, dominant nonspherocytic hemolytic anemia, hereditary neuropathy, hereditary neuropathy (Russe type), recessive hereditary neuropathy (Russe type), dominant hereditary neuropathy (Russe type), choroidal sclerosis, recessive choroidal sclerosis, dominant choroidal sclerosis, retinopathy, recessive retinopathy, dominant retinopathy, combined dominant and recessive retinopathy, diffuse dominant retinopathy, variable dominant retinopathy, diffuse and variable dominant retinopathy, microcephaly, recessive microcephaly, dominant microcephaly, lymphedema dominant microcephaly, chorioretinopathy dominant microcephaly, lymphedema and chorioretinopathy dominant microcephaly, chorioretinopathy, recessive chorioretinopathy, dominant chorioretinopathy, chorioretinopathy and microcephaly, recessive chorioretinopathy and microcephaly, dominant chorioretinopathy and microcephaly, renal-coloboma syndrome, recessive renal-coloboma syndrome, dominant renal-coloboma syndrome, non-syndromic deafness, recessive non-syndromic deafness, dominant non-syndromic deafness, gyrate atrophy, recessive gyrate atrophy, dominant gyrate atrophy, gyrate atrophy of the choroid and retina, vitreoretinopathy, exudative vitreoretinopathy, familial exudative vitreoretinopathy, recessive familial exudative vitreoretinopathy, dominant familial exudative vitreoretinopathy, dominant familial exudative vitreoretinopathy and Coats disease, neovascular inflammatory vitreoretinopathy, recessive neovascular inflammatory vitreoretinopathy, dominant neovascular inflammatory vitreoretinopathy, atrophia areata, recessive atrophia areata, dominant atrophia areata, Meckel syndrome, recessive Meckel syndrome, dominant Meckel syndrome, vitreoretinochoroidopathy, recessive vitreoretinochoroidopathy, dominant vitreoretinochoroidopathy, bestrophinopathy, recessive bestrophinopathy, dominant bestrophinopathy, high bone mass trait, recessive high bone mass trait, dominant high bone mass trait, osteoporosis-pseudoglioma syndrome, recessive osteoporosis-pseudoglioma syndrome, dominant osteoporosis-pseudoglioma syndrome, microphthalmos, recessive microphthalmos, dominant microphthalmos, retinal disease syndrome, recessive retinal disease syndrome, dominant retinal disease syndrome, microphthalmos and retinal disease syndrome, recessive microphthalmos and retinal disease syndrome, dominant microphthalmos and retinal disease syndrome, nanophthalmos, recessive nanophthalmos, dominant nanophthalmos, bone dysplasias, recessive bone dysplasias, dominant bone dysplasias, developmental disorders, osteoarthritic diseases and syndromic disorders, cavitary optic disc anomalies, recessive cavitary optic disc anomalies, dominant cavitary optic disc anomalies, fundus albipunctatus, recessive fundus albipunctatus, dominant fundus albipunctatus, mevalonic aciduria, recessive mevalonic aciduria, dominant mevalonic aciduria, hyper-IgD syndrome, recessive hyper-IgD syndrome, dominant hyper-IgD syndrome, spastic paraplegia, recessive spastic paraplegia, dominant spastic paraplegia, neuropathy recessive spastic paraplegia, optic atrophy recessive spastic paraplegia, neuropathy and optic atrophy recessive spastic paraplegia (dementia), recessive dementia, dominant dementia, familial dominant dementia, retinoblastoma, recessive retinoblastoma, dominant retinoblastoma, germline retinoblastoma, somatic retinoblastoma, dominant germline or somatic retinoblastoma, retinoma, benign retinoma, pinealoma, osteogenic sarcoma, rod monochromacy, recessive rod monochromacy, dominant rod monochromacy, achromatopsia, recessive achromatopsia, dominant achromatopsia, rod achromatopsia, rod recessive achromatopsia, rod dominant achromatopsia, recessive rod monochromacy or achromatopsia, pattern dystrophy, recessive pattern dystrophy, dominant pattern dystrophy, S-cone syndrome, enhanced S-cone syndrome (ESC), recessive ESC, dominant ESC, Goldmann-Favre syndrome, recessive Goldmann-Favre syndrome, dominant Goldmann-Favre syndrome, Bothnia dystrophy, recessive Bothnia dystrophy, dominant Bothnia dystrophy, retinitis punctata albescens, recessive retinitis punctata albescens, dominant retinitis punctata albescens, mucolipidosis III gamma, recessive mucolipidosis III gamma, dominant mucolipidosis III gamma, Mainzer-Saldino syndrome, recessive Mainzer-Saldino syndrome, dominant Mainzer-Saldino syndrome, pseudoxanthoma elasticum, recessive pseudoxanthoma elasticum, dominant pseudoxanthoma elasticum, Knobloch syndrome, recessive Knobloch syndrome, dominant Knobloch syndrome, foveal hypoplasia, recessive foveal hypoplasia, dominant foveal hypoplasia, anterior segment dysgenesis, recessive anterior segment dysgenesis, dominant anterior segment dysgenesis, foveal hypoplasia and anterior segment dysgenesis, recessive foveal hypoplasia and anterior segment dysgenesis, dominant foveal hypoplasia and anterior segment dysgenesis, spastic ataxia, recessive spastic ataxia, dominant spastic ataxia, de Grouchy syndrome, Boucher-Neuhauser syndrome, recessive Boucher-Neuhauser syndrome, dominant Boucher-Neuhauser syndrome, Boucher-Neuhauser syndrome with chorioretinal dystrophy, recessive Boucher-Neuhauser syndrome with chorioretinal dystrophy, dominant Boucher-Neuhauser syndrome with chorioretinal dystrophy, hypoprebetalipoproteinemia, acanthocytosis, retinitis pigmentosa, and palladial (HARP), degeneration, recessive HARP degeneration, dominant HARP degeneration, Hallervorden-Spatz syndrome, recessive Hallervorden-Spatz syndrome, dominant Hallervorden-Spatz syndrome, Alagille syndrome, recessive Alagille syndrome, dominant Alagille syndrome, polyneuropathy, hearing loss, ataxia, retinitis pigmentosa and early-onset cataract (PHARC), recessive PHARC, dominant PHARC, recessive syndromic PHARC, Sorsby's fundus dystrophy, recessive Sorsby's fundus dystrophy, dominant Sorsby's fundus dystrophy, vitreoretinal dystrophy, recessive vitreoretinal dystrophy, dominant vitreoretinal dystrophy, optic neuropathy, recessive optic neuropathy, dominant optic neuropathy, late onset dominant optic neuropathy, orofaciodigital syndrome 1, Simpson-Golabi-Behmel syndrome 2, X-linked retinoschisis, X-linked Oregon eye disease, X-linked optic atrophy, retinal dysplasia, recessive retinal dysplasia, dominant retinal dysplasia, X-linked retinal dysplasia, primary X-linked retinal dysplasia, X-linked Norrie disease, Coats disease, X-linked Åland Island eye disease, Autoimmune Inner Ear Disease (AIED), AIED-like disease, choroideremia, X-linked choroideremia, neuropathy, optic atrophy, deafness and retinitis pigmentosa, X-linked neuropathy, optic atrophy, deafness and retinitis pigmentosa, X-linked blue cone monochromacy, X-linked protanomaly and rare macular dystrophy in blue cone monochromacy (BCM), X-linked deuteranomaly and rare macular dystrophy in blue cone monochromacy (BCM), mitochondrial Kearns-Sayre syndrome including retinal pigmentary degeneration, Leigh syndrome, retinopathy, mitochondrial pigmentary retinopathy and sensorineural hearing loss, ocular albinism, oculocutaneous albinism, Neuronal ceroid lipofuscinoses, Zellweger spectrum disorder, Cobalamin C deficiency, blue-cone monochromatism, hereditary red-green color vision defects, tritan and yellow-blue defects, bradyopsia, delayed cone adaptation, Uveitis, Diabetic Retinopathy, Diabetic Macular Edema, Persistent Corneal Epithelial Defect, Neurotrophic Keratitis, Herpes Stromal Keratitis, Chronic Dry Eye, Glaucoma, ocular abrasion, ocular blistering, ocular scarring, vision loss, blindness, corneal blindness, and dry eye disease, aqueous deficiency dry eye disease, Sjögren's syndrome-related aqueous deficiency dry eye disease, non-Sjögren's syndrome-related dry eye disease, evaporative dry eye disease, meibomian gland dysfunction, blepharitis, lid margin inflammation, ocular rosacea and atopy, aqueous deficiency and evaporative dry eye disease, Fuchs dystrophy, Fuchs endothelial corneal dystrophy (FECD), Fuchs endothelial dystrophy (FED), panuveitis, diffuse uveitis, total uveitis, cataract, partial cataracts, complete cataracts, stationary cataracts, progressive cataracts, hard cataracts, soft cataracts, nuclear cataracts, nuclear sclerosis cataracts, cortical cataracts, posterior subcapsular cataracts, congenital cataracts, corneal dystrophy, Epithelial and subepithelial dystrophies, Epithelial basement membrane dystrophy, Epithelial recurrent erosion dystrophies (Franceschetti corneal dystrophy, Dystrophia Smolandiensis, and/or Dystrophia Helsinglandica), Subepithelial mucinous corneal dystrophy, Meesmann corneal dystrophy, Lisch epithelial corneal dystrophy, Gelatinous drop-like corneal dystrophy, Bowman Layer dystrophies, Reis-Bucklers corneal dystrophy, Thiel-Behnke corneal dystrophy, Stromal dystrophies-TGFB1 corneal dystrophies, Lattice corneal dystrophy, type 1 variants (III, IIIA, I/IIIA, IV) of lattice corneal dystrophy, Granular corneal dystrophy, type 1, Granular corneal dystrophy, type 2, Stromal dystrophies, Macular corneal dystrophy, Schnyder crystalline corneal dystrophy, Congenital stromal corneal dystrophy, Fleck corneal dystrophy, Posterior amorphous corneal dystrophy, Central cloudy dystrophy of François, Pre-Descemet corneal dystrophy, Endothelial dystrophies, Fuchs' dystrophy, Posterior polymorphous corneal dystrophy, Congenital hereditary endothelial dystrophy, X-linked endothelial corneal dystrophy, Superficial dystrophies, Epithelial basement membrane dystrophy, Meesmann juvenile epithelial corneal dystrophy, Gelatinous drop-like corneal dystrophy, Lisch epithelial corneal dystrophy, Subepithelial mucinous corneal dystrophy, Reis-Bucklers corneal dystrophy, Thiel-Behnke dystrophy, Stromal dystrophies, Lattice corneal dystrophy, Granular corneal dystrophy, Macular corneal dystrophy, Schnyder crystalline corneal dystrophy, Congenital stromal corneal dystrophy, Fleck corneal dystrophy, Posterior dystrophies, Fuchs' dystrophy, Posterior polymorphous corneal dystrophy, Congenital hereditary endothelial dystrophy, keratopathy, band keratopathy, corneal band keratopathy, calcific band keratopathy.
[0224] Embodiment 62: the herpes virus or the pharmaceutical composition of embodiment 61, wherein the eye condition or disease is neurotrophic keratitis, Stargardt disease, or Leber congenital amaurosis.
[0225] Embodiment 63: the herpes virus or the pharmaceutical composition of embodiment 61 or 62, wherein the eye condition or disease is neurotrophic keratitis.
[0226] Embodiment 64: the herpes virus or the pharmaceutical composition of any of embodiments 61-63, wherein the eye condition or disease is Stargardt disease.
[0227] Embodiment 65: the herpes virus or the pharmaceutical composition of any of embodiments 61-64, wherein the eye condition or disease is Leber congenital amaurosis.
[0228] Embodiment 66: use of the herpes virus of any of embodiments 42-50 or the pharmaceutical composition of any of embodiments 51-57 in the manufacture of a medicament for an eye condition or disease.
[0229] Embodiment 67: the use of embodiment 66, wherein the eye condition or disease is selected from the group consisting of retinitis pigmentosa, recessive retinitis pigmentosa, severe recessive retinitis pigmentosa, dominant retinitis pigmentosa, dominant retinitis pigmentosa with choroidal involvement, recessive retinitis pigmentosa with para-arteriolar preservation of the RPE (PPRPE), recessive retinitis pigmentosa with posterior column ataxia (PCARP), recessive retinitis pigmentosa with erythrocytic microcytosis, syndromic recessive retinitis pigmentosa, recessive syndromic disease with retinitis pigmentosa, non-syndromic recessive retinitis pigmentosa, non-syndromic dominant retinitis pigmentosa, syndromic dominant retinitis pigmentosa, juvenile recessive retinitis pigmentosa, recessive retinitis pigmentosa and mental retardation, recessive retinitis pigmentosa with macular degeneration, severe early-onset recessive retinitis pigmentosa, recessive retinitis pigmentosa and skeletal anomalies, recessive retinitis pigmentosa and skeletal abnormalities, dominant retinitis pigmentosa with sensorineural deafness, recessive retinitis pigmentosa with hearing loss, recessive retinitis pigmentosa with hearing loss and additional disabilities, recessive retinitis pigmentosa with vitreal alterations, early onset with macular coloboma recessive retinitis pigmentosa, X-linked retinitis pigmentosa, recessive X-linked retinitis pigmentosa, dominant X-linked retinitis pigmentosa, severe X-linked retinitis pigmentosa, X-linked retinitis pigmentosa with mental retardation, X-linked retinitis pigmentosa with myopathy, Bardet-Biedl like retinitis pigmentosa, Bardet-Biedl like recessive retinitis pigmentosa, digenic retinitis pigmentosa, digenic retinitis pigmentosa with retinal outer segment membrane protein 1, digenic retinitis pigmentosa with PRPH2, recessive retinitis pigmentosa with early macular involvement, recessive deafness without retinitis pigmentosa, recessive congenital deafness without retinitis pigmentosa, recessive retinitis pigmentosa and recessive ataxia, recessive retinitis pigmentosa and dominant ataxia, mitochondrial retinitis pigmentosa, mitochondrial retinitis pigmentosa with developmental and neurological abnormalities, mitochondrial retinitis pigmentosa with progressive sensorineural hearing loss, mitochondrial retinitis pigmentosa with deafness and neurological abnormalities, Autosomal Dominant Retinitis Pigmentosa, Nonsyndromic Autosomal Dominant Retinitis Pigmentosa, Autosomal Recessive, Retinitis Pigmentosa, Nonsyndromic Autosomal Recessive Retinitis Pigmentosa, Retinal pigment epithelium (RPE), recessive RPE, dominant RPE, recessive RPE degeneration, dominant RPE degeneration, ataxia, recessive ataxia, dominant ataxia, Senior-Loken syndrome, recessive Senior-Loken syndrome, dominant Senior-Loken syndrome, nephronophthisis, recessive nephronophthisis, dominant nephronophthisis, adolescent recessive nephronophthisis, ciliopathy-related recessive nephronophthisis, juvenile nephronophthisis, juvenile recessive nephronophthisis, juvenile dominant nephronophthisis, Usher syndrome, Usher syndrome type I, Usher syndrome type II, Usher syndrome type III, recessive Usher syndrome, atypical recessive Usher syndrome, dominant Usher syndrome, type 2 recessive Usher syndrome, type 2a recessive Usher syndrome, type 3 recessive Usher syndrome, type 3-like recessive Usher syndrome, atypical recessive Usher syndrome, type 1 recessive Usher syndrome, type 1b recessive Usher syndrome, type 1d recessive Usher syndrome, type 1f recessive Usher syndrome, type 1J recessive Usher syndrome, type 1k recessive Usher syndrome, digenic Usher syndrome with CDH23, digenic Usher syndrome with PCDH15, Acadian recessive Usher syndrome, recessive atypical Usher syndrome (USH3-like), Leber congenital amaurosis, recessive Leber congenital amaurosis, dominant Leber congenital amaurosis, de novo Leber congenital amaurosis, dominant Leber congenital amaurosis and pituitary dysfunction, recessive Leber congenital amaurosis with myopathy, recessive Leber congenital amaurosis with severe childhood retinal dystrophy, mitochondrial Leber hereditary optic neuropathy, Leber hereditary optic neuropathy, optic atrophy, recessive optic atrophy, dominant optic atrophy, optic atrophy with ataxia, recessive optic atrophy with ataxia, dominant optic atrophy with ataxia, recessive optic atrophy with ataxia and 3-methylglutaconic aciduria, dominant optic atrophy with cataract, ataxia and areflexia, Kjer type dominant optic atrophy, dominant optic atrophy with sensorineural hearing loss, recessive cerebellar degeneration with optic atrophy, optic atrophy with deadness-dystonia syndrome, X-linked optic atrophy with deadness-dystonia syndrome, retinal dystrophy, recessive retinal dystrophy, dominant retinal dystrophy, inherited retinal dystrophy, early onset recessive retinal dystrophy, recessive syndromic retinal dystrophy, recessive non-syndromic retinal dystrophy, recessive syndromic and non-syndromic retinal dystrophy, recessive optic atrophy and retinal dystrophy, recessive retinal dystrophy and obesity, recessive retinal dystrophy and cerebellar dysplasia, syndromic recessive optic atrophy and retinal dystrophy, dominant retinal dystrophy with iris coloboma, spectrum of ciliopathies including retinal dystrophy, recessive spectrum of ciliopathies including retinal dystrophy, dominant spectrum of ciliopathies including retinal dystrophy, dominant optic atrophy with neuropathy and myopathy, dominant optic atrophy with intellectual disability and developmental delay, syndromic optic atrophy, non-syndromic optic atrophy, recessive non-syndromic optic atrophy, dominant non-syndromic optic atrophy, recessive syndromic optic atrophy, dominant syndromic optic atrophy, Charcot-Marie-Tooth disease, recessive Charcot-Marie-Tooth disease, dominant Charcot-Marie-Tooth disease, benign fleck retina, recessive benign fleck retina, dominant benign fleck retina, syndromic retinopathy, recessive syndromic retinopathy, dominant syndromic retinopathy, Batten disease, recessive Batten disease, dominant Batten disease, recessive Batten disease (ceroid-lipofuscinosis, neuronal 3), juvenile recessive Batten disease (ceroid-lipofuscinosis, neuronal 3), neuronal ceroid lipofuscinosis, recessive neuronal ceroid lipofuscinosis, recessive neuronal ceroid lipofuscinosis 1, dominant neuronal ceroid lipofuscinosis, Stargardt disease, recessive Stargardt disease, dominant Stargardt disease, juvenile Stargardt disease, late onset Stargardt disease, Stargardt-like macular dystrophy, recessive Stargardt-like macular dystrophy, dominant Stargardt-like macular dystrophy, macular dystrophy, recessive macular dystrophy, early onset macular dystrophy, adult onset macular dystrophy, early onset recessive macular dystrophy, adult onset recessive macular dystrophy, early adult onset recessive macular dystrophy, juvenile with hypotrichosis recessive macular dystrophy, dominant macular dystrophy, late onset dominant macular dystrophy, dominant macular dystrophy with lens zonules, bull's-eye dominant macular dystrophy, butterfly-shaped dominant macular dystrophy, age-related dominant macular dystrophy, benign concentric annular dominant macular dystrophy, vitelliform recessive macular dystrophy, vitelliform dominant macular dystrophy, atypical vitelliform dominant macular dystrophy, dominant adult vitelliform macular dystrophy, Stargardt-like dominant macular dystrophy, Stargardt type dominant macular dystrophy, North Carolina dominant macular dystrophy, North Carolina-like dominant macular dystrophy, North Carolina-like with progressive sensorineural hearing loss dominant macular dystrophy, cystoid dominant macular dystrophy, Best type dominant macular dystrophy, occult macular dystrophy, recessive occult macular dystrophy, dominant occult macular dystrophy, age-related familial macular dystrophy, X-linked atrophic macular dystrophy, recessive X-linked atrophic macular dystrophy, dominant X-linked atrophic macular dystrophy, mitochondrial macular pattern dystrophy with type II diabetes and deafness, fundus flavimaculatus, recessive fundus flavimaculatus, dominant fundus flavimaculatus, rod dystrophy, recessive rod dystrophy, dominant rod dystrophy, cone dystrophy, recessive cone dystrophy, dominant cone dystrophy, recessive cone dystrophy with supernormal rod electroretinogram, early onset recessive cone dystrophy, late onset recessive cone dystrophy, cone dystrophy 1, X-linked cone dystrophy 1, cone dystrophy 2, progressive cone dystrophy 2, X-linked progressive cone dystrophy 2, delayed cone adaptation, recessive delayed cone adaptation, dominant delayed cone adaptation, cone-rod dystrophy, recessive cone-rod dystrophy, dominant cone-rod dystrophy, isolated cone-rod dystrophy, progressive cone-rod dystrophy, X-linked cone-rod dystrophy, X-linked progressive cone-rod dystrophy, progressive dominant cone-rod dystrophy, cone-rod dystrophy and amelogenesis imperfecta syndrome, recessive cone-rod dystrophy and amelogenesis imperfecta syndrome, dominant cone-rod dystrophy and amelogenesis imperfecta syndrome, recessive cone-rod dystrophy with inner retinopathy, recessive cone-rod dystrophy with skeletal disease, congenital syndromic nonprogressive recessive cone-rod dystrophy, recessive cone-rod dystrophy with hearing loss, recessive cone-rod dystrophy with psychomotor delay, recessive cone and cone-rod dystrophy, cone-rod synaptic disease, congenital cone-rod synaptic disease, recessive congenital cone-rod synaptic disease, dominant congenital cone-rod synaptic disease, rod-cone dystrophy, recessive rod-cone dystrophy, dominant rod-cone dystrophy, early onset recessive rod-cone dystrophy, non-syndromic recessive rod-cone dystrophy, recessive Newfoundland rod-cone dystrophy, recessive progressive cone dystrophy, Stickler syndrome, dominant Stickler syndrome, recessive Stickler syndrome, dominant Stickler syndrome type I, dominant Stickler syndrome type II, Marshall syndrome, dominant Marshall syndrome, recessive Marshall syndrome, achromatopsia, recessive achromatopsia, dominant achromatopsia, recessive complete achromatopsia, recessive incomplete achromatopsia, macular degeneration, age-related macular degeneration, complex etiology age-related macular degeneration, isolated age-related macular degeneration, wet age-related macular degeneration, dry age-related macular degeneration, drusen, recessive drusen, dominant drusen, early-onset recessive drusen, early-onset dominant drusen, macular drusen, dominant radial macular drusen, pigmented paravenous chorioretinal atrophy, recessive pigmented paravenous chorioretinal atrophy, dominant pigmented paravenous chorioretinal atrophy, progressive Bifocal Chorioretinal Atrophy, Bardet-Biedl syndrome, recessive Bardet-Biedl syndrome, dominant Bardet-Biedl syndrome, recessive Bardet-Biedl syndrome with developmental anomalies, retinal degeneration, recessive retinal degeneration, dominant retinal degeneration, non-syndromic recessive retinal degeneration, Doyne honeycomb retinal degeneration, recessive Doyne honeycomb retinal degeneration, dominant Doyne honeycomb retinal degeneration (Malattia Leventinese), recessive nephronophthisis with retinal degeneration, Alström syndrome, recessive Alström syndrome, dominant Alström syndrome, Joubert syndrome, recessive Joubert syndrome, dominant Joubert syndrome, Jobert syndrome, recessive Jobert syndrome, dominant Jobert syndrome, X-linked Jobert syndrome, vitreoretinal degeneration, recessive vitreoretinal degeneration, dominant vitreoretinal degeneration, snowflake vitreoretinal degeneration, snowflake dominant vitreoretinal degeneration, Oguchi disease, recessive Oguchi disease, dominant Oguchi disease, night blindness, stationary night blindness, congenital night blindness, congenital stationary night blindness, severe congenital stationary night blindness, recessive congenital stationary night blindness, recessive complete congenital stationary night blindness, dominant congenital stationary night blindness, Nougaret type dominant congenital stationary night blindness, Oguchi type recessive congenital stationary night blindness, Riggs type recessive congenital stationary night blindness, Schubert-Bornschein type recessive congenital stationary night blindness, fundus albipunctatus type recessive congenital stationary night blindness, complete recessive congenital stationary night blindness, X-linked congenital stationary night blindness, incomplete X-linked congenital stationary night blindness, retinal vasculopathy, cerebral leukodystrophy, retinal vasculopathy with cerebral leukodystrophy, recessive retinal vasculopathy with cerebral leukodystrophy, dominant retinal vasculopathy with cerebral leukodystrophy, Aicardi-Goutiere syndrome, Aicardi-Goutiere syndrome 1, recessive Aicardi-Goutiere syndrome 1, dominant Aicardi-utiere syndrome 1, chilblain lupus, recessive chilblain lupus, dominant chilblain lupus, Martinique retinal dystrophy and retinitis pigmentosa, recessive Martinique retinal dystrophy and retinitis pigmentosa, dominant Martinique retinal dystrophy and retinitis pigmentosa, spinocerebellar ataxia, recessive spinocerebellar ataxia, dominant spinocerebellar ataxia, spinocerebellar ataxia with macular dystrophy, spinocerebellar ataxia with retinal degeneration, spinocerebellar ataxia with macular dystrophy or retinal degeneration, recessive spinocerebellar ataxia with macular dystrophy or retinal degeneration, dominant spinocerebellar ataxia with macular dystrophy or retinal degeneration, Wolfram syndrome, recessive Wolfram syndrome, dominant Wolfram syndrome, low frequency sensorineural hearing loss, recessive low frequency sensorineural hearing loss, dominant low frequency sensorineural hearing loss, oculoauricular syndrome, recessive oculoauricular syndrome, dominant oculoauricular syndrome, recessive renal, skeletal and retinal anomalies, recessive abetalipoproteinemia, microcephaly, recessive microcephaly, dominant microcephaly, growth failure and retinopathy recessive microcephaly, Bietti crystalline corneoretinal dystrophy, recessive Bietti crystalline corneoretinal dystrophy, dominant Bietti crystalline corneoretinal dystrophy, Wagner disease, erosive vitreoretinopathy, Wagner disease and erosive vitreoretinopathy, recessive Wagner disease and erosive vitreoretinopathy, dominant Wagner disease and erosive vitreoretinopathy, febrile convulsions, recessive febrile convulsions, dominant febrile convulsions, dominant/recessive febrile convulsions, choroidal dystrophy, recessive choroidal dystrophy, dominant choroidal dystrophy, central areolar choroidal dystrophy, dominant central areolar choroidal dystrophy, recessive central areolar choroidal dystrophy, epiphyseal dysplasia, recessive epiphyseal dysplasia, dominant epiphyseal dysplasia, multiple epiphyseal dysplasia, recessive multiple epiphyseal dysplasia, dominant multiple epiphyseal dysplasia, ichthyosis, recessive ichthyosis, dominant ichthyosis, quadriplegia and retardation recessive ichthyosis, chorioretinal atrophy, bifocal chorioretinal atrophy, progressive bifocal chorioretinal atrophy, recessive progressive bifocal chorioretinal atrophy, dominant progressive bifocal chorioretinal atrophy, Refsum disease, recessive Refsum disease, dominant Refsum disease, adult form recessive Refsum disease, infantile form recessive Refsum disease, retinal-cone dystrophy, recessive retinal-cone dystrophy, dominant retinal-cone dystrophy, retinal-cone dystrophy 1, recessive retinal-cone dystrophy 1, dominant retinal-cone dystrophy 1, tritanopia, recessive tritanopia, dominant tritanopia, mucopolysaccharidosis, recessive mucopolysaccharidosis, dominant mucopolysaccharidosis, achromatopsia Pingelapese, recessive achromatopsia Pingelapese, dominant achromatopsia Pingelapese, Klippel-Feil syndrome, recessive Klippel-Feil syndrome, dominant Klippel-Feil syndrome, microphthalmia, recessive microphthalmia, dominant microphthalmia, limb-girdle muscular dystrophy, recessive limb-girdle muscular dystrophy, dominant limb-girdle muscular dystrophy, short-rib thoracic dysplasia, recessive short-rib thoracic dysplasia, dominant short-rib thoracic dysplasia, polydactyly recessive short-rib thoracic dysplasia, retinal dystrophy recessive short-rib thoracic dysplasia, mental retardation, truncal obesity, retinal dystrophy, and micropenis (MORM) syndrome, recessive MORM syndrome, dominant MORM syndrome, spasticity and retinal degeneration recessive retardation, Cockayne syndrome, recessive Cockayne syndrome, dominant Cockayne syndrome, congenital retinal nonattachment, recessive nonsyndromal congenital retinal nonattachment, dominant nonsyndromal congenital retinal nonattachment, hemolytic anemia, nonspherocytic hemolytic anemia, recessive nonspherocytic hemolytic anemia, dominant nonspherocytic hemolytic anemia, hereditary neuropathy, hereditary neuropathy (Russe type), recessive hereditary neuropathy (Russe type), dominant hereditary neuropathy (Russe type), choroidal sclerosis, recessive choroidal sclerosis, dominant choroidal sclerosis, retinopathy, recessive retinopathy, dominant retinopathy, combined dominant and recessive retinopathy, diffuse dominant retinopathy, variable dominant retinopathy, diffuse and variable dominant retinopathy, microcephaly, recessive microcephaly, dominant microcephaly, lymphedema dominant microcephaly, chorioretinopathy dominant microcephaly, lymphedema and chorioretinopathy dominant microcephaly, chorioretinopathy, recessive chorioretinopathy, dominant chorioretinopathy, chorioretinopathy and microcephaly, recessive chorioretinopathy and microcephaly, dominant chorioretinopathy and microcephaly, renal-coloboma syndrome, recessive renal-coloboma syndrome, dominant renal-coloboma syndrome, non-syndromic deafness, recessive non-syndromic deafness, dominant non-syndromic deafness, gyrate atrophy, recessive gyrate atrophy, dominant gyrate atrophy, gyrate atrophy of the choroid and retina, vitreoretinopathy, exudative vitreoretinopathy, familial exudative vitreoretinopathy, recessive familial exudative vitreoretinopathy, dominant familial exudative vitreoretinopathy, dominant familial exudative vitreoretinopathy and Coats disease, neovascular inflammatory vitreoretinopathy, recessive neovascular inflammatory vitreoretinopathy, dominant neovascular inflammatory vitreoretinopathy, atrophia areata, recessive atrophia areata, dominant atrophia areata, Meckel syndrome, recessive Meckel syndrome, dominant Meckel syndrome, vitreoretinochoroidopathy, recessive vitreoretinochoroidopathy, dominant vitreoretinochoroidopathy, bestrophinopathy, recessive bestrophinopathy, dominant bestrophinopathy, high bone mass trait, recessive high bone mass trait, dominant high bone mass trait, osteoporosis-pseudoglioma syndrome, recessive osteoporosis-pseudoglioma syndrome, dominant osteoporosis-pseudoglioma syndrome, microphthalmos, recessive microphthalmos, dominant microphthalmos, retinal disease syndrome, recessive retinal disease syndrome, dominant retinal disease syndrome, microphthalmos and retinal disease syndrome, recessive microphthalmos and retinal disease syndrome, dominant microphthalmos and retinal disease syndrome, nanophthalmos, recessive nanophthalmos, dominant nanophthalmos, bone dysplasias, recessive bone dysplasias, dominant bone dysplasias, developmental disorders, osteoarthritic diseases and syndromic disorders, cavitary optic disc anomalies, recessive cavitary optic disc anomalies, dominant cavitary optic disc anomalies, fundus albipunctatus, recessive fundus albipunctatus, dominant fundus albipunctatus, mevalonic aciduria, recessive mevalonic aciduria, dominant mevalonic aciduria, hyper-IgD syndrome, recessive hyper-IgD syndrome, dominant hyper-IgD syndrome, spastic paraplegia, recessive spastic paraplegia, dominant spastic paraplegia, neuropathy recessive spastic paraplegia, optic atrophy recessive spastic paraplegia, neuropathy and optic atrophy recessive spastic paraplegia (dementia), recessive dementia, dominant dementia, familial dominant dementia, retinoblastoma, recessive retinoblastoma, dominant retinoblastoma, germline retinoblastoma, somatic retinoblastoma, dominant germline or somatic retinoblastoma, retinoma, benign retinoma, pinealoma, osteogenic sarcoma, rod monochromacy, recessive rod monochromacy, dominant rod monochromacy, achromatopsia, recessive achromatopsia, dominant achromatopsia, rod achromatopsia, rod recessive achromatopsia, rod dominant achromatopsia, recessive rod monochromacy or achromatopsia, pattern dystrophy, recessive pattern dystrophy, dominant pattern dystrophy, S-cone syndrome, enhanced S-cone syndrome (ESC), recessive ESC, dominant ESC, Goldmann-Favre syndrome, recessive Goldmann-Favre syndrome, dominant Goldmann-Favre syndrome, Bothnia dystrophy, recessive Bothnia dystrophy, dominant Bothnia dystrophy, retinitis punctata albescens, recessive retinitis punctata albescens, dominant retinitis punctata albescens, mucolipidosis III gamma, recessive mucolipidosis III gamma, dominant mucolipidosis Ill gamma, Mainzer-Saldino syndrome, recessive Mainzer-Saldino syndrome, dominant Mainzer-Saldino syndrome, pseudoxanthoma elasticum, recessive pseudoxanthoma elasticum, dominant pseudoxanthoma elasticum, Knobloch syndrome, recessive Knobloch syndrome, dominant Knobloch syndrome, foveal hypoplasia, recessive foveal hypoplasia, dominant foveal hypoplasia, anterior segment dysgenesis, recessive anterior segment dysgenesis, dominant anterior segment dysgenesis, foveal hypoplasia and anterior segment dysgenesis, recessive foveal hypoplasia and anterior segment dysgenesis, dominant foveal hypoplasia and anterior segment dysgenesis, spastic ataxia, recessive spastic ataxia, dominant spastic ataxia, de Grouchy syndrome, Boucher-Neuhauser syndrome, recessive Boucher-Neuhauser syndrome, dominant Boucher-Neuhauser syndrome, Boucher-Neuhauser syndrome with chorioretinal dystrophy, recessive Boucher-Neuhauser syndrome with chorioretinal dystrophy, dominant Boucher-Neuhauser syndrome with chorioretinal dystrophy, hypoprebetalipoproteinemia, acanthocytosis, retinitis pigmentosa, and palladial (HARP), degeneration, recessive HARP degeneration, dominant HARP degeneration, Hallervorden-Spatz syndrome, recessive Hallervorden-Spatz syndrome, dominant Hallervorden-Spatz syndrome, Alagille syndrome, recessive Alagille syndrome, dominant Alagille syndrome, polyneuropathy, hearing loss, ataxia, retinitis pigmentosa and early-onset cataract (PHARC), recessive PHARC, dominant PHARC, recessive syndromic PHARC, Sorsby's fundus dystrophy, recessive Sorsby's fundus dystrophy, dominant Sorsby's fundus dystrophy, vitreoretinal dystrophy, recessive vitreoretinal dystrophy, dominant vitreoretinal dystrophy, optic neuropathy, recessive optic neuropathy, dominant optic neuropathy, late onset dominant optic neuropathy, orofaciodigital syndrome 1, Simpson-Golabi-Behmel syndrome 2, X-linked retinoschisis, X-linked Oregon eye disease, X-linked optic atrophy, retinal dysplasia, recessive retinal dysplasia, dominant retinal dysplasia, X-linked retinal dysplasia, primary X-linked retinal dysplasia, X-linked Norrie disease, Coats disease, X-linked Åland Island eye disease, Autoimmune Inner Ear Disease (AIED), AIED-like disease, choroideremia, X-linked choroideremia, neuropathy, optic atrophy, deafness and retinitis pigmentosa, X-linked neuropathy, optic atrophy, deafness and retinitis pigmentosa, X-linked blue cone monochromacy, X-linked protanomaly and rare macular dystrophy in blue cone monochromacy (BCM), X-linked deuteranomaly and rare macular dystrophy in blue cone monochromacy (BCM), mitochondrial Kearns-Sayre syndrome including retinal pigmentary degeneration, Leigh syndrome, retinopathy, mitochondrial pigmentary retinopathy and sensorineural hearing loss, ocular albinism, oculocutaneous albinism, Neuronal ceroid lipofuscinoses, Zellweger spectrum disorder, Cobalamin C deficiency, blue-cone monochromatism, hereditary red-green color vision defects, tritan and yellow-blue defects, bradyopsia, delayed cone adaptation, Uveitis, Diabetic Retinopathy, Diabetic Macular Edema, Persistent Corneal Epithelial Defect, Neurotrophic Keratitis, Herpes Stromal Keratitis, Chronic Dry Eye, Glaucoma, ocular abrasion, ocular blistering, ocular scarring, vision loss, blindness, corneal blindness, dry eye disease, aqueous deficiency dry eye disease, Sjögren's syndrome-related aqueous deficiency dry eye disease, non-Sjögren's syndrome-related dry eye disease, evaporative dry eye disease, meibomian gland dysfunction, blepharitis, lid margin inflammation, ocular rosacea and atopy, aqueous deficiency and evaporative dry eye disease, Fuchs dystrophy, Fuchs endothelial corneal dystrophy (FECD), Fuchs endothelial dystrophy (FED), panuveitis, diffuse uveitis, total uveitis, cataract, partial cataracts, complete cataracts, stationary cataracts, progressive cataracts, hard cataracts, soft cataracts, nuclear cataracts, nuclear sclerosis cataracts, cortical cataracts, posterior subcapsular cataracts, congenital cataracts, corneal dystrophy, Epithelial and subepithelial dystrophies, Epithelial basement membrane dystrophy, Epithelial recurrent erosion dystrophies (Franceschetti corneal dystrophy, Dystrophia Smolandiensis, and/or Dystrophia Helsinglandica), Subepithelial mucinous corneal dystrophy, Meesmann corneal dystrophy, Lisch epithelial corneal dystrophy, Gelatinous drop-like corneal dystrophy, Bowman Layer dystrophies, Reis-Bücklers corneal dystrophy, Thiel-Behnke corneal dystrophy, Stromal dystrophies-TGFB1 corneal dystrophies, Lattice corneal dystrophy, type 1 variants (III, IIIA, I/IIIA, IV) of lattice corneal dystrophy, Granular corneal dystrophy, type 1, Granular corneal dystrophy, type 2, Stromal dystrophies, Macular corneal dystrophy, Schnyder crystalline corneal dystrophy, Congenital stromal corneal dystrophy, Fleck corneal dystrophy, Posterior amorphous corneal dystrophy, Central cloudy dystrophy of François, Pre-Descemet corneal dystrophy, Endothelial dystrophies, Fuchs' dystrophy, Posterior polymorphous corneal dystrophy, Congenital hereditary endothelial dystrophy, X-linked endothelial corneal dystrophy, Superficial dystrophies, Epithelial basement membrane dystrophy, Meesmann juvenile epithelial corneal dystrophy, Gelatinous drop-like corneal dystrophy, Lisch epithelial corneal dystrophy, Subepithelial mucinous corneal dystrophy, Reis-Bucklers corneal dystrophy, Thiel-Behnke dystrophy, Stromal dystrophies, Lattice corneal dystrophy, Granular corneal dystrophy, Macular corneal dystrophy, Schnyder crystalline corneal dystrophy, Congenital stromal corneal dystrophy, Fleck corneal dystrophy, Posterior dystrophies, Fuchs' dystrophy, Posterior polymorphous corneal dystrophy, Congenital hereditary endothelial dystrophy, keratopathy, band keratopathy, corneal band keratopathy, and calcific band keratopathy.
[0230] Embodiment 68: the use of embodiment 66 or 67, wherein the eye condition or disease is neurotrophic keratitis, Stargardt disease, or Leber congenital amaurosis.
[0231] Embodiment 69: the use of any of embodiments 66-68, wherein the eye condition or disease is neurotrophic keratitis.
[0232] Embodiment 70: the use of any of embodiments 66-69, wherein the eye condition or disease is Stargardt disease.
[0233] Embodiment 71: the use of any of embodiments 66-70, wherein the eye condition or disease is Leber congenital amaurosis.
[0234] Embodiment 72: a method of expressing, enhancing, increasing, augmenting, and/or supplementing the levels of a polypeptide in one or more cells of an eye of a subject, the method comprising administering to the subject an effective amount of the herpes virus of any of embodiments 42-50 or the pharmaceutical composition of any of embodiments 51-57.
[0235] Embodiment 73: the method of embodiment 72, wherein the one or more cells are one or more rod cells, cone cells, retinal ganglion cells, bipolar cells, horizontal cells, muller cells, or amacrine cell.
[0236] Embodiment 74: a method of providing prophylactic, palliative, or therapeutic relief of one or more signs or symptoms of an eye condition or disease in a subject in need thereof, the method comprising administering to the subject an effective amount of the herpes virus of any of embodiments 42-50 or the pharmaceutical composition of any of embodiments 51-57.
[0237] Embodiment 75: a method of treating an eye condition or disease in a subject in need thereof, the method comprising administering to the subject an effective amount of the herpes virus of any of embodiments 42-50 or the pharmaceutical composition of any of embodiments 51-57.
[0238] Embodiment 76: the method of embodiment 74 or 75, wherein the eye condition or disease is selected from the group consisting of retinitis pigmentosa, recessive retinitis pigmentosa, severe recessive retinitis pigmentosa, dominant retinitis pigmentosa, dominant retinitis pigmentosa with choroidal involvement, recessive retinitis pigmentosa with para-arteriolar preservation of the RPE (PPRPE), recessive retinitis pigmentosa with posterior column ataxia (PCARP), recessive retinitis pigmentosa with erythrocytic microcytosis, syndromic recessive retinitis pigmentosa, recessive syndromic disease with retinitis pigmentosa, non-syndromic recessive retinitis pigmentosa, non-syndromic dominant retinitis pigmentosa, syndromic dominant retinitis pigmentosa, juvenile recessive retinitis pigmentosa, recessive retinitis pigmentosa and mental retardation, recessive retinitis pigmentosa with macular degeneration, severe early-onset recessive retinitis pigmentosa, recessive retinitis pigmentosa and skeletal anomalies, recessive retinitis pigmentosa and skeletal abnormalities, dominant retinitis pigmentosa with sensorineural deafness, recessive retinitis pigmentosa with hearing loss, recessive retinitis pigmentosa with hearing loss and additional disabilities, recessive retinitis pigmentosa with vitreal alterations, early onset with macular coloboma recessive retinitis pigmentosa, X-linked retinitis pigmentosa, recessive X-linked retinitis pigmentosa, dominant X-linked retinitis pigmentosa, severe X-linked retinitis pigmentosa, X-linked retinitis pigmentosa with mental retardation, X-linked retinitis pigmentosa with myopathy, Bardet-Biedl like retinitis pigmentosa, Bardet-Biedl like recessive retinitis pigmentosa, digenic retinitis pigmentosa, digenic retinitis pigmentosa with retinal outer segment membrane protein 1, digenic retinitis pigmentosa with PRPH2, recessive retinitis pigmentosa with early macular involvement, recessive deafness without retinitis pigmentosa, recessive congenital deafness without retinitis pigmentosa, recessive retinitis pigmentosa and recessive ataxia, recessive retinitis pigmentosa and dominant ataxia, mitochondrial retinitis pigmentosa, mitochondrial retinitis pigmentosa with developmental and neurological abnormalities, mitochondrial retinitis pigmentosa with progressive sensorineural hearing loss, mitochondrial retinitis pigmentosa with deafness and neurological abnormalities, Autosomal Dominant Retinitis Pigmentosa, Nonsyndromic Autosomal Dominant Retinitis Pigmentosa, Autosomal Recessive, Retinitis Pigmentosa, Nonsyndromic Autosomal Recessive Retinitis Pigmentosa, Retinal pigment epithelium (RPE), recessive RPE, dominant RPE, recessive RPE degeneration, dominant RPE degeneration, ataxia, recessive ataxia, dominant ataxia, Senior-Loken syndrome, recessive Senior-Loken syndrome, dominant Senior-Loken syndrome, nephronophthisis, recessive nephronophthisis, dominant nephronophthisis, adolescent recessive nephronophthisis, ciliopathy-related recessive nephronophthisis, juvenile nephronophthisis, juvenile recessive nephronophthisis, juvenile dominant nephronophthisis, Usher syndrome, Usher syndrome type I, Usher syndrome type II, Usher syndrome type III, recessive Usher syndrome, atypical recessive Usher syndrome, dominant Usher syndrome, type 2 recessive Usher syndrome, type 2a recessive Usher syndrome, type 3 recessive Usher syndrome, type 3-like recessive Usher syndrome, atypical recessive Usher syndrome, type 1 recessive Usher syndrome, type 1b recessive Usher syndrome, type 1d recessive Usher syndrome, type 1f recessive Usher syndrome, type 1J recessive Usher syndrome, type 1k recessive Usher syndrome, digenic Usher syndrome with CDH23, digenic Usher syndrome with PCDH15, Acadian recessive Usher syndrome, recessive atypical Usher syndrome (USH3-like), Leber congenital amaurosis, recessive Leber congenital amaurosis, dominant Leber congenital amaurosis, de novo Leber congenital amaurosis, dominant Leber congenital amaurosis and pituitary dysfunction, recessive Leber congenital amaurosis with myopathy, recessive Leber congenital amaurosis with severe childhood retinal dystrophy, mitochondrial Leber hereditary optic neuropathy, Leber hereditary optic neuropathy, optic atrophy, recessive optic atrophy, dominant optic atrophy, optic atrophy with ataxia, recessive optic atrophy with ataxia, dominant optic atrophy with ataxia, recessive optic atrophy with ataxia and 3-methylglutaconic aciduria, dominant optic atrophy with cataract, ataxia and areflexia, Kjer type dominant optic atrophy, dominant optic atrophy with sensorineural hearing loss, recessive cerebellar degeneration with optic atrophy, optic atrophy with deadness-dystonia syndrome, X-linked optic atrophy with deadness-dystonia syndrome, retinal dystrophy, recessive retinal dystrophy, dominant retinal dystrophy, inherited retinal dystrophy, early onset recessive retinal dystrophy, recessive syndromic retinal dystrophy, recessive non-syndromic retinal dystrophy, recessive syndromic and non-syndromic retinal dystrophy, recessive optic atrophy and retinal dystrophy, recessive retinal dystrophy and obesity, recessive retinal dystrophy and cerebellar dysplasia, syndromic recessive optic atrophy and retinal dystrophy, dominant retinal dystrophy with iris coloboma, spectrum of ciliopathies including retinal dystrophy, recessive spectrum of ciliopathies including retinal dystrophy, dominant spectrum of ciliopathies including retinal dystrophy, dominant optic atrophy with neuropathy and myopathy, dominant optic atrophy with intellectual disability and developmental delay, syndromic optic atrophy, non-syndromic optic atrophy, recessive non-syndromic optic atrophy, dominant non-syndromic optic atrophy, recessive syndromic optic atrophy, dominant syndromic optic atrophy, Charcot-Marie-Tooth disease, recessive Charcot-Marie-Tooth disease, dominant Charcot-Marie-Tooth disease, benign fleck retina, recessive benign fleck retina, dominant benign fleck retina, syndromic retinopathy, recessive syndromic retinopathy, dominant syndromic retinopathy, Batten disease, recessive Batten disease, dominant Batten disease, recessive Batten disease (ceroid-lipofuscinosis, neuronal 3), juvenile recessive Batten disease (ceroid-lipofuscinosis, neuronal 3), neuronal ceroid lipofuscinosis, recessive neuronal ceroid lipofuscinosis, recessive neuronal ceroid lipofuscinosis 1, dominant neuronal ceroid lipofuscinosis, Stargardt disease, recessive Stargardt disease, dominant Stargardt disease, juvenile Stargardt disease, late onset Stargardt disease, Stargardt-like macular dystrophy, recessive Stargardt-like macular dystrophy, dominant Stargardt-like macular dystrophy, macular dystrophy, recessive macular dystrophy, early onset macular dystrophy, adult onset macular dystrophy, early onset recessive macular dystrophy, adult onset recessive macular dystrophy, early adult onset recessive macular dystrophy, juvenile with hypotrichosis recessive macular dystrophy, dominant macular dystrophy, late onset dominant macular dystrophy, dominant macular dystrophy with lens zonules, bull's-eye dominant macular dystrophy, butterfly-shaped dominant macular dystrophy, age-related dominant macular dystrophy, benign concentric annular dominant macular dystrophy, vitelliform recessive macular dystrophy, vitelliform dominant macular dystrophy, atypical vitelliform dominant macular dystrophy, dominant adult vitelliform macular dystrophy, Stargardt-like dominant macular dystrophy, Stargardt type dominant macular dystrophy, North Carolina dominant macular dystrophy, North Carolina-like dominant macular dystrophy, North Carolina-like with progressive sensorineural hearing loss dominant macular dystrophy, cystoid dominant macular dystrophy, Best type dominant macular dystrophy, occult macular dystrophy, recessive occult macular dystrophy, dominant occult macular dystrophy, age-related familial macular dystrophy, X-linked atrophic macular dystrophy, recessive X-linked atrophic macular dystrophy, dominant X-linked atrophic macular dystrophy, mitochondrial macular pattern dystrophy with type II diabetes and deafness, fundus flavimaculatus, recessive fundus flavimaculatus, dominant fundus flavimaculatus, rod dystrophy, recessive rod dystrophy, dominant rod dystrophy, cone dystrophy, recessive cone dystrophy, dominant cone dystrophy, recessive cone dystrophy with supernormal rod electroretinogram, early onset recessive cone dystrophy, late onset recessive cone dystrophy, cone dystrophy 1, X-linked cone dystrophy 1, cone dystrophy 2, progressive cone dystrophy 2, X-linked progressive cone dystrophy 2, delayed cone adaptation, recessive delayed cone adaptation, dominant delayed cone adaptation, cone-rod dystrophy, recessive cone-rod dystrophy, dominant cone-rod dystrophy, isolated cone-rod dystrophy, progressive cone-rod dystrophy, X-linked cone-rod dystrophy, X-linked progressive cone-rod dystrophy, progressive dominant cone-rod dystrophy, cone-rod dystrophy and amelogenesis imperfecta syndrome, recessive cone-rod dystrophy and amelogenesis imperfecta syndrome, dominant cone-rod dystrophy and amelogenesis imperfecta syndrome, recessive cone-rod dystrophy with inner retinopathy, recessive cone-rod dystrophy with skeletal disease, congenital syndromic nonprogressive recessive cone-rod dystrophy, recessive cone-rod dystrophy with hearing loss, recessive cone-rod dystrophy with psychomotor delay, recessive cone and cone-rod dystrophy, cone-rod synaptic disease, congenital cone-rod synaptic disease, recessive congenital cone-rod synaptic disease, dominant congenital cone-rod synaptic disease, rod-cone dystrophy, recessive rod-cone dystrophy, dominant rod-cone dystrophy, early onset recessive rod-cone dystrophy, non-syndromic recessive rod-cone dystrophy, recessive Newfoundland rod-cone dystrophy, recessive progressive cone dystrophy, Stickler syndrome, dominant Stickler syndrome, recessive Stickler syndrome, dominant Stickler syndrome type I, dominant Stickler syndrome type II, Marshall syndrome, dominant Marshall syndrome, recessive Marshall syndrome, achromatopsia, recessive achromatopsia, dominant achromatopsia, recessive complete achromatopsia, recessive incomplete achromatopsia, macular degeneration, age-related macular degeneration, complex etiology age-related macular degeneration, isolated age-related macular degeneration, wet age-related macular degeneration, dry age-related macular degeneration, drusen, recessive drusen, dominant drusen, early-onset recessive drusen, early-onset dominant drusen, macular drusen, dominant radial macular drusen, pigmented paravenous chorioretinal atrophy, recessive pigmented paravenous chorioretinal atrophy, dominant pigmented paravenous chorioretinal atrophy, progressive Bifocal Chorioretinal Atrophy, Bardet-Biedl syndrome, recessive Bardet-Biedl syndrome, dominant Bardet-Biedl syndrome, recessive Bardet-Biedl syndrome with developmental anomalies, retinal degeneration, recessive retinal degeneration, dominant retinal degeneration, non-syndromic recessive retinal degeneration, Doyne honeycomb retinal degeneration, recessive Doyne honeycomb retinal degeneration, dominant Doyne honeycomb retinal degeneration (Malattia Leventinese), recessive nephronophthisis with retinal degeneration, Alström syndrome, recessive Alström syndrome, dominant Alström syndrome, Joubert syndrome, recessive Joubert syndrome, dominant Joubert syndrome, Jobert syndrome, recessive Jobert syndrome, dominant Jobert syndrome, X-linked Jobert syndrome, vitreoretinal degeneration, recessive vitreoretinal degeneration, dominant vitreoretinal degeneration, snowflake vitreoretinal degeneration, snowflake dominant vitreoretinal degeneration, Oguchi disease, recessive Oguchi disease, dominant Oguchi disease, night blindness, stationary night blindness, congenital recessive congenital stationary night blindness, recessive complete congenital stationary night blindness, dominant congenital stationary night blindness, Nougaret type dominant congenital stationary night blindness, Oguchi type recessive congenital stationary night blindness, Riggs type recessive congenital stationary night blindness, Schubert-Bornschein type recessive congenital stationary night blindness, fundus albipunctatus type recessive congenital stationary night blindness, complete recessive congenital stationary night blindness, X-linked congenital stationary night blindness, incomplete X-linked congenital stationary night blindness, retinal vasculopathy, cerebral leukodystrophy, retinal vasculopathy with cerebral leukodystrophy, recessive retinal vasculopathy with cerebral leukodystrophy, dominant retinal vasculopathy with cerebral leukodystrophy, Aicardi-Goutiere syndrome, Aicardi-Goutiere syndrome 1, recessive Aicardi-Goutiere syndrome 1, dominant Aicardi-utiere syndrome 1, chilblain lupus, recessive chilblain lupus, dominant chilblain lupus, Martinique retinal dystrophy and retinitis pigmentosa, recessive Martinique retinal dystrophy and retinitis pigmentosa, dominant Martinique retinal dystrophy and retinitis pigmentosa, spinocerebellar ataxia, recessive spinocerebellar ataxia, dominant spinocerebellar ataxia, spinocerebellar ataxia with macular dystrophy, spinocerebellar ataxia with retinal degeneration, spinocerebellar ataxia with macular dystrophy or retinal degeneration, recessive spinocerebellar ataxia with macular dystrophy or retinal degeneration, dominant spinocerebellar ataxia with macular dystrophy or retinal degeneration, Wolfram syndrome, recessive Wolfram syndrome, dominant Wolfram syndrome, low frequency sensorineural hearing loss, recessive low frequency sensorineural hearing loss, dominant low frequency sensorineural hearing loss, oculoauricular syndrome, recessive oculoauricular syndrome, dominant oculoauricular syndrome, recessive renal, skeletal and retinal anomalies, recessive abetalipoproteinemia, microcephaly, recessive microcephaly, dominant microcephaly, growth failure and retinopathy recessive microcephaly, Bietti crystalline corneoretinal dystrophy, recessive Bietti crystalline corneoretinal dystrophy, dominant Bietti crystalline corneoretinal dystrophy, Wagner disease, erosive vitreoretinopathy, Wagner disease and erosive vitreoretinopathy, recessive Wagner disease and erosive vitreoretinopathy, dominant Wagner disease and erosive vitreoretinopathy, febrile convulsions, recessive febrile convulsions, dominant febrile convulsions, dominant/recessive febrile convulsions, choroidal dystrophy, recessive choroidal dystrophy, dominant choroidal dystrophy, central areolar choroidal dystrophy, dominant central areolar choroidal dystrophy, recessive central areolar choroidal dystrophy, epiphyseal dysplasia, recessive epiphyseal dysplasia, dominant epiphyseal dysplasia, multiple epiphyseal dysplasia, recessive multiple epiphyseal dysplasia, dominant multiple epiphyseal dysplasia, ichthyosis, recessive ichthyosis, dominant ichthyosis, quadriplegia and retardation recessive ichthyosis, chorioretinal atrophy, bifocal chorioretinal atrophy, progressive bifocal chorioretinal atrophy, recessive progressive bifocal chorioretinal atrophy, dominant progressive bifocal chorioretinal atrophy, Refsum disease, recessive Refsum disease, dominant Refsum disease, adult form recessive Refsum disease, infantile form recessive Refsum disease, retinal-cone dystrophy, recessive retinal-cone dystrophy, dominant retinal-cone dystrophy, retinal-cone dystrophy 1, recessive retinal-cone dystrophy 1, dominant retinal-cone dystrophy 1, tritanopia, recessive tritanopia, dominant tritanopia, mucopolysaccharidosis, recessive mucopolysaccharidosis, dominant mucopolysaccharidosis, achromatopsia Pingelapese, recessive achromatopsia Pingelapese, dominant achromatopsia Pingelapese, Klippel-Feil syndrome, recessive Klippel-Feil syndrome, dominant Klippel-Feil syndrome, microphthalmia, recessive microphthalmia, dominant microphthalmia, limb-girdle muscular dystrophy, recessive limb-girdle muscular dystrophy, dominant limb-girdle muscular dystrophy, short-rib thoracic dysplasia, recessive short-rib thoracic dysplasia, dominant short-rib thoracic dysplasia, polydactyly recessive short-rib thoracic dysplasia, retinal dystrophy recessive short-rib thoracic dysplasia, mental retardation, truncal obesity, retinal dystrophy, and micropenis (MORM) syndrome, recessive MORM syndrome, dominant MORM syndrome, spasticity and retinal degeneration recessive retardation, Cockayne syndrome, recessive Cockayne syndrome, dominant Cockayne syndrome, congenital retinal nonattachment, recessive nonsyndromal congenital retinal nonattachment, dominant nonsyndromal congenital retinal nonattachment, hemolytic anemia, nonspherocytic hemolytic anemia, recessive nonspherocytic hemolytic anemia, dominant nonspherocytic hemolytic anemia, hereditary neuropathy, hereditary neuropathy (Russe type), recessive hereditary neuropathy (Russe type), dominant hereditary neuropathy (Russe type), choroidal sclerosis, recessive choroidal sclerosis, dominant choroidal sclerosis, retinopathy, recessive retinopathy, dominant retinopathy, combined dominant and recessive retinopathy, diffuse dominant retinopathy, variable dominant retinopathy, diffuse and variable dominant retinopathy, microcephaly, recessive microcephaly, dominant microcephaly, lymphedema dominant microcephaly, chorioretinopathy dominant microcephaly, lymphedema and chorioretinopathy dominant microcephaly, chorioretinopathy, recessive chorioretinopathy, dominant chorioretinopathy, chorioretinopathy and microcephaly, recessive chorioretinopathy and microcephaly, dominant chorioretinopathy and microcephaly, renal-coloboma syndrome, recessive renal-coloboma syndrome, dominant renal-coloboma syndrome, non-syndromic deafness, recessive non-syndromic deafness, dominant non-syndromic deafness, gyrate atrophy, recessive gyrate atrophy, dominant gyrate atrophy, gyrate atrophy of the choroid and retina, vitreoretinopathy, exudative vitreoretinopathy, familial exudative vitreoretinopathy, recessive familial exudative vitreoretinopathy, dominant familial exudative vitreoretinopathy, dominant familial exudative vitreoretinopathy and Coats disease, neovascular inflammatory vitreoretinopathy, recessive neovascular inflammatory vitreoretinopathy, dominant neovascular inflammatory vitreoretinopathy, atrophia areata, recessive atrophia areata, dominant atrophia areata, Meckel syndrome, recessive Meckel syndrome, dominant Meckel syndrome, vitreoretinochoroidopathy, recessive vitreoretinochoroidopathy, dominant vitreoretinochoroidopathy, bestrophinopathy, recessive bestrophinopathy, dominant bestrophinopathy, high bone mass trait, recessive high bone mass trait, dominant high bone mass trait, osteoporosis-pseudoglioma syndrome, recessive osteoporosis-pseudoglioma syndrome, dominant osteoporosis-pseudoglioma syndrome, microphthalmos, recessive microphthalmos, dominant microphthalmos, retinal disease syndrome, recessive retinal disease syndrome, dominant retinal disease syndrome, microphthalmos and retinal disease syndrome, recessive microphthalmos and retinal disease syndrome, dominant microphthalmos and retinal disease syndrome, nanophthalmos, recessive nanophthalmos, dominant nanophthalmos, bone dysplasias, recessive bone dysplasias, dominant bone dysplasias, developmental disorders, osteoarthritic diseases and syndromic disorders, cavitary optic disc anomalies, recessive cavitary optic disc anomalies, dominant cavitary optic disc anomalies, fundus albipunctatus, recessive fundus albipunctatus, dominant fundus albipunctatus, mevalonic aciduria, recessive mevalonic aciduria, dominant mevalonic aciduria, hyper-IgD syndrome, recessive hyper-IgD syndrome, dominant hyper-IgD syndrome, spastic paraplegia, recessive spastic paraplegia, dominant spastic paraplegia, neuropathy recessive spastic paraplegia, optic atrophy recessive spastic paraplegia, neuropathy and optic atrophy recessive spastic paraplegia (dementia), recessive dementia, dominant dementia, familial dominant dementia, retinoblastoma, recessive retinoblastoma, dominant retinoblastoma, germline retinoblastoma, somatic retinoblastoma, dominant germline or somatic retinoblastoma, retinoma, benign retinoma, pinealoma, osteogenic sarcoma, rod monochromacy, recessive rod monochromacy, dominant rod monochromacy, achromatopsia, recessive achromatopsia, dominant achromatopsia, rod achromatopsia, rod recessive achromatopsia, rod dominant achromatopsia, recessive rod monochromacy or achromatopsia, pattern dystrophy, recessive pattern dystrophy, dominant pattern dystrophy, S-cone syndrome, enhanced S-cone syndrome (ESC), recessive ESC, dominant ESC, Goldmann-Favre syndrome, recessive Goldmann-Favre syndrome, dominant Goldmann-Favre syndrome, Bothnia dystrophy, recessive Bothnia dystrophy, dominant Bothnia dystrophy, retinitis punctata albescens, recessive retinitis punctata albescens, dominant retinitis punctata albescens, mucolipidosis III gamma, recessive mucolipidosis III gamma, dominant mucolipidosis III gamma, Mainzer-Saldino syndrome, recessive Mainzer-Saldino syndrome, dominant Mainzer-Saldino syndrome, pseudoxanthoma elasticum, recessive pseudoxanthoma elasticum, dominant pseudoxanthoma elasticum, Knobloch syndrome, recessive Knobloch syndrome, dominant Knobloch syndrome, foveal hypoplasia, recessive foveal hypoplasia, dominant foveal hypoplasia, anterior segment dysgenesis, recessive anterior segment dysgenesis, dominant anterior segment dysgenesis, foveal hypoplasia and anterior segment dysgenesis, recessive foveal hypoplasia and anterior segment dysgenesis, dominant foveal hypoplasia and anterior segment dysgenesis, spastic ataxia, recessive spastic ataxia, dominant spastic ataxia, de Grouchy syndrome, Boucher-Neuhauser syndrome, recessive Boucher-Neuhauser syndrome, dominant Boucher-Neuhauser syndrome, Boucher-Neuhauser syndrome with chorioretinal dystrophy, recessive Boucher-Neuhauser syndrome with chorioretinal dystrophy, dominant Boucher-Neuhauser syndrome with chorioretinal dystrophy, hypoprebetalipoproteinemia, acanthocytosis, retinitis pigmentosa, and palladial (HARP), degeneration, recessive HARP degeneration, dominant HARP degeneration, Hallervorden-Spatz syndrome, recessive Hallervorden-Spatz syndrome, dominant Hallervorden-Spatz syndrome, Alagille syndrome, recessive Alagille syndrome, dominant Alagille syndrome, polyneuropathy, hearing loss, ataxia, retinitis pigmentosa and early-onset cataract (PHARC), recessive PHARC, dominant PHARC, recessive syndromic PHARC, Sorsby's fundus dystrophy, recessive Sorsby's fundus dystrophy, dominant Sorsby's fundus dystrophy, vitreoretinal dystrophy, recessive vitreoretinal dystrophy, dominant vitreoretinal dystrophy, optic neuropathy, recessive optic neuropathy, dominant optic neuropathy, late onset dominant optic neuropathy, orofaciodigital syndrome 1, Simpson-Golabi-Behmel syndrome 2, X-linked retinoschisis, X-linked Oregon eye disease, X-linked optic atrophy, retinal dysplasia, recessive retinal dysplasia, dominant retinal dysplasia, X-linked retinal dysplasia, primary X-linked retinal dysplasia, X-linked Norrie disease, Coats disease, X-linked Åland Island eye disease, Autoimmune Inner Ear Disease (AIED), AIED-like disease, choroideremia, X-linked choroideremia, neuropathy, optic atrophy, deafness and retinitis pigmentosa, X-linked neuropathy, optic atrophy, deafness and retinitis pigmentosa, X-linked blue cone monochromacy, X-linked protanomaly and rare macular dystrophy in blue cone monochromacy (BCM), X-linked deuteranomaly and rare macular dystrophy in blue cone monochromacy (BCM), mitochondrial Kearns-Sayre syndrome including retinal pigmentary degeneration, Leigh syndrome, retinopathy, mitochondrial pigmentary retinopathy and sensorineural hearing loss, ocular albinism, oculocutaneous albinism, Neuronal ceroid lipofuscinoses, Zellweger spectrum disorder, Cobalamin C deficiency, blue-cone monochromatism, hereditary red-green color vision defects, tritan and yellow-blue defects, bradyopsia, delayed cone adaptation, Uveitis, Diabetic Retinopathy, Diabetic Macular Edema, Persistent Corneal Epithelial Defect, Neurotrophic Keratitis, Herpes Stromal Keratitis, Chronic Dry Eye, Glaucoma, ocular abrasion, ocular blistering, ocular scarring, vision loss, blindness, corneal blindness, dry eye disease, aqueous deficiency dry eye disease, Sjögren's syndrome-related aqueous deficiency dry eye disease, non-Sjögren's syndrome-related dry eye disease, evaporative dry eye disease, meibomian gland dysfunction, blepharitis, lid margin inflammation, ocular rosacea and atopy, aqueous deficiency and evaporative dry eye disease, Fuchs dystrophy, Fuchs endothelial corneal dystrophy (FECD), Fuchs endothelial dystrophy (FED), panuveitis, diffuse uveitis, total uveitis, cataract, partial cataracts, complete cataracts, stationary cataracts, progressive cataracts, hard cataracts, soft cataracts, nuclear cataracts, nuclear sclerosis cataracts, cortical cataracts, posterior subcapsular cataracts, congenital cataracts, corneal dystrophy, Epithelial and subepithelial dystrophies, Epithelial basement membrane dystrophy, Epithelial recurrent erosion dystrophies (Franceschetti corneal dystrophy, Dystrophia Smolandiensis, and/or Dystrophia Helsinglandica), Subepithelial mucinous corneal dystrophy, Meesmann corneal dystrophy, Lisch epithelial corneal dystrophy, Gelatinous drop-like corneal dystrophy, Bowman Layer dystrophies, Reis-Bücklers corneal dystrophy, Thiel-Behnke corneal dystrophy, Stromal dystrophies-TGFB1 corneal dystrophies, Lattice corneal dystrophy, type 1 variants (III, IIIA, I/IIIA, IV) of lattice corneal dystrophy, Granular corneal dystrophy, type 1, Granular corneal dystrophy, type 2, Stromal dystrophies, Macular corneal dystrophy, Schnyder crystalline corneal dystrophy, Congenital stromal corneal dystrophy, Fleck corneal dystrophy, Posterior amorphous corneal dystrophy, Central cloudy dystrophy of François, Pre-Descemet corneal dystrophy, Endothelial dystrophies, Fuchs' dystrophy, Posterior polymorphous corneal dystrophy, Congenital hereditary endothelial dystrophy, X-linked endothelial corneal dystrophy, Superficial dystrophies, Epithelial basement membrane dystrophy, Meesmann juvenile epithelial corneal dystrophy, Gelatinous drop-like corneal dystrophy, Lisch epithelial corneal dystrophy, Subepithelial mucinous corneal dystrophy, Reis-Bucklers corneal dystrophy, Thiel-Behnke dystrophy, Stromal dystrophies, Lattice corneal dystrophy, Granular corneal dystrophy, Macular corneal dystrophy, Schnyder crystalline corneal dystrophy, Congenital stromal corneal dystrophy, Fleck corneal dystrophy, Posterior dystrophies, Fuchs' dystrophy, Posterior polymorphous corneal dystrophy, Congenital hereditary endothelial dystrophy, keratopathy, band keratopathy, corneal band keratopathy, and calcific band keratopathy.
[0239] Embodiment 77: the method of any of embodiments 74-76, wherein the eye condition or disease is neurotrophic keratitis, Stargardt disease, or Leber congenital amaurosis.
[0240] Embodiment 78: the method of any of embodiments 74-77, wherein the eye condition or disease is neurotrophic keratitis.
[0241] Embodiment 79: the method of any of embodiments 74-78, wherein the eye condition or disease is Stargardt disease.
[0242] Embodiment 80: the method of any of embodiments 74-79, wherein the eye condition or disease is Leber congenital amaurosis.
[0243] Embodiment 81: the method of any of embodiments 72-80, wherein the subject is a human.
[0244] Embodiment 82: the method of any of embodiments 72-81, wherein the herpes virus or pharmaceutical composition is administered via injection, via injection to the eye, via subretinal injection, via intraocular injection, via intravitreal injection, intraocularly, intravitreally, topically, subcutaneously, subconjunctivally, subtenonly, intracamerally, retrobulbarly, systemically, parenterally, periocularly, juxtasclerally, anterior juxtasclerally, posterior juxtasclerally, orally, peribulbarly, or suprachoroidally to the subject.
[0245] Embodiment 83: the method of any of embodiments 72-82, wherein the herpes virus or pharmaceutical composition is administered via injection to the eye, via subretinal injection, via intravitreal injection, suprachoroidally, or topically to the subject.
[0246] Embodiment 84: the method of any of embodiments 72-83, wherein the herpes virus or pharmaceutical composition is administered topically to the subject.
[0247] Embodiment 85: the method of any of embodiments 72-84, wherein the herpes virus or pharmaceutical composition is administered via suprachoroidally to the subject.

[0248] The specification is considered to be sufficient to enable one skilled in the art to practice the present disclosure. Various modifications of the present disclosure in addition to those shown and described herein will become apparent to those skilled in the art from the foregoing description and fall within the scope of the appended claims.

### EXAMPLES

[0249] The present disclosure will be more fully understood by reference to the following examples. It should not, however, be construed as limiting the scope of the present disclosure. It is understood that the examples and embodiments described herein are for illustrative purposes only and that various modifications or changes in light thereof will be suggested to persons skilled in the art and are to be included within the spirit and purview of this application and scope of the appended claims.

### Example 1: Modified Herpes Simplex Virus Vectors Encoding a Polypeptide

[0250] To make modified herpes simplex virus genome vectors capable of expressing polypeptides in a target mammalian cell (such as cells of the eye), a herpes simplex virus genome (FIG. 1A) is first modified to inactivate one or more herpes simplex virus genes. Such modifications may decrease the toxicity of the genome in mammalian cells. Next, variants of these modified/attenuated recombinant viral constructs are generated such that they carry one or more polynucleotides encoding the desired polypeptide. These variants include: a recombinant ΔICP4-modified HSV-1 genome comprising expression cassettes containing the coding sequence of a polypeptide under the control of a heterologous promoter integrated at each ICP4 locus (FIG. 1B); a recombinant ΔICP4/ΔUL41-modified HSV-1 genome comprising expression cassettes containing the coding sequence of a polypeptide under the control of a heterologous promoter integrated at each ICP4 locus (FIG. 1C); a recombinant ΔICP4/ΔUL41-modified HSV-1 genome comprising an expression cassette containing the coding sequence of a polypeptide under the control of a heterologous promoter integrated at the UL41 locus (FIG. 1D); a recombinant ΔICP4/ΔICP22-modified HSV-1 genome comprising expression cassettes containing the coding sequence of a polypeptide under the control of a heterologous promoter integrated at each ICP4 locus (FIG. 1E); a recombinant ΔICP4/ΔICP22-modified HSV-1 genome comprising an expression cassette containing the coding sequence of a polypeptide under the control of a heterologous promoter integrated at the ICP22 locus (FIG. 1F); a recombinant ΔICP4/ΔUL41/ΔICP22-modified HSV-1 genome comprising expression cassettes containing the coding sequence of a polypeptide under the control of a heterologous promoter integrated at each ICP4 locus (FIG. 1G); a recombinant ΔICP4/ΔUL41/ΔICP22-modified HSV-1 genome comprising an expression cassette containing the coding sequence of a polypeptide (e.g., SEQ ID NO: 3) under the control of a heterologous promoter integrated at the UL41 locus (FIG. 1H); and a recombinant ΔICP4/ΔUL41/ΔICP22-modified HSV-1 genome comprising an expression cassette containing the coding sequence of a polypeptide under the control of a heterologous promoter integrated at the ICP22 locus (FIG. 1I).

[0251] These modified herpes simplex virus genome vectors are transfected into engineered cells that are modified to express one or more herpes simplex virus genes. These engineered cells secrete into the supernatant of the cell culture a replication-defective herpes simplex virus with the modified genomes packaged therein. The supernatant is then collected, concentrated, and sterile filtered.

[0252] Modified herpes simplex virus genome vectors described herein can express any one or more of the exemplary polypeptides in Table 1 below, in any suitable combination.

TABLE 1
Representative Polypeptides and Polynucleotides

| | | UniProt | | | NCBI |
|---|---|---|---|---|---|
| Amino acid | | Accession | Nucleic acid | | Gene |
| SEQ ID NO. | Protein Name | No. | SEQ ID NO. | Gene Name | ID No. |
| 21 | Sterile alpha motif domain-containing protein 11 | Q96NU1 | 378 | SAMD11 | 148398 |
| 22 | Nephrocystin-4 | O75161 | 379 | NPHP4 | 261734 |
| 23 | Espin | B1AK53 | 380 | ESPN | 83715 |
| 24 | Nicotinamide/nicotinic acid mononucleotide | Q9HAN9 | 381 | NMNAT1 | 64802 |
| | adenylyltransferase 1 | | | | |
| 25 | Mitofusin-2 | O95140 | 382 | MFN2 | 9927 |
| 26 | ER membrane protein complex subunit 1 | Q8N766 | 383 | EMC1 | 23065 |
| 27 | Phospholipase A2 group V | P39877 | 384 | PLA2G5 | 5322 |
| 28 | Dehydrodolichyl diphosphate synthase complex | Q86SQ9 | 385 | DHDDS | 79947 |
| | subunit | | | | |
| 29 | Palmitoyl-protein thioesterase 1 | P50897 | 386 | PPT1 | 5538 |
| 30 | Elongation of very long chain fatty acids protein 1 | Q9BW60 | 387 | ELOVL1 | 64834 |
| 31 | Protein O-linked-mannose beta-1,2-N- | Q8WZA1 | 388 | POMGNT1 | 55624 |
| | acetylglucosaminyltransferase 1 | | | | |
| 32 | Retinoid isomerohydrolase | Q16518 | 389 | RPE65 | 6121 |
| 33 | Retinal-specific phospholipid-transporting ATPase | P78363 | 390 | ABCA4 | 24 |
| 34 | Collagen alpha-1(XI) | P12107 | 391 | COL11A1 | 1301 |
| 35 | Guanine nucleotide-binding protein G(t) subunit | P19087 | 392 | GNAT2 | 2780 |
| | alpha-2 | | | | |
| 36 | Chloride channel CLIC-like protein 1 | Q96S66 | 393 | CLCC1 | 23155 |
| 37 | DNA damage-regulated autophagy modulator | Q6UX65 | 394 | DRAM2 | 128338 |
| | protein 2 | | | | |
| 38 | U4/U6 small nuclear ribonucleoprotein Prp3 | O43395 | 395 | PRPF3 | 9129 |
| 39 | Alpha-endosulfine | O43768 | 396 | ENSA | 2029 |
| 40 | Semaphorin-4A | Q9H3S1 | 397 | SEMA4A | 64218 |
| 41 | Cyclic AMP-dependent transcription factor ATF-6 | P18850 | 398 | ATF6 | 22926 |
| | alpha | | | | |
| 42 | Hemicentin-1 | Q96RW7 | 399 | HMCN1 | 83872 |
| 43 | Complement factor H | P08603 | 400 | CFH | 3075 |
| 44 | Protein crumbs homolog 1 | P82279 | 401 | CRB1 | 23418 |
| 45 | Adiponectin receptor protein 1 | Q96A54 | 402 | ADIPOR1 | 51094 |
| 46 | Protein RD3 | Q7Z3Z2 | 403 | RD3 | 343035 |
| 47 | Serine/threonine-protein kinase Nek2 | P51955 | 404 | NEK2 | 4751 |
| 48 | Feline leukemia virus subgroup C receptor-related | Q9YSY0 | 405 | FLVCR1 | 28982 |
| | protein 1 | | | | |
| 49 | Usherin | O75445 | 406 | USH2A | 7399 |
| 50 | Serologically defined colon cancer antigen 8 | Q86SQ7 | 407 | SDCCAG8 | 10806 |
| 51 | Olfactory receptor 2W3 | Q7Z3T1 | 408 | OR2W3 | 343171 |
| 52 | NBAS subunit of NRZ tethering complex | A2RRP1 | 409 | NBAS | 51594 |
| 53 | Cytosolic carboxypeptidase-like protein 5 | Q8NDL9 | 410 | AGBL5 | 60509 |
| 54 | Zinc finger protein 513 | Q8N8E2 | 411 | ZNF513 | 130557 |
| 55 | Intraflagellar transport protein 172 homolog | Q9UG01 | 412 | IFT172 | 26160 |
| 56 | Photoreceptor cilium actin regulator | A6NGG8 | 413 | PCARE | 388939 |
| 57 | EGF-containing fibulin-like extracellular matrix | Q12808 | 414 | EFEMP1/ | 2202 |
| | protein 1/TLE family member 5 | | | TLES | |
| 58 | Protein FAM161A | Q3B820 | 415 | FAM161A | 84140 |
| 59 | WD repeat-containing and planar cell polarity | O95876 | 416 | WDPCP | 51057 |
| | effector protein fritz homolog | | | | |
| 60 | Centrosome-associated protein ALMS1 | Q8TCU4 | 417 | ALMS1 | 7840 |
| 61 | US small nuclear ribonucleoprotein 200 kDa | O75643 | 418 | SNRNP200 | 23020 |
| | helicase | | | | |
| 62 | Metal transporter CNNM4 | Q6P4Q7 | 419 | CNNM4 | 26504 |
| 63 | Cyclic nucleotide-gated cation channel alpha-3 | Q16281 | 420 | CNGA3 | 1261 |
| 64 | Nephrocystin-1 | O15259 | 421 | NPHP1 | 4867 |
| 65 | Tyrosine-protein kinase Mer | Q12866 | 422 | MERTK | 10461 |
| 66 | Bardet-Biedl syndrome 5 protein | Q8N3I7 | 423 | BBS5 | 129880 |
| 67 | Ceramide kinase-like protein | Q49MI3 | 424 | CERKL | 375298 |
| 68 | Neurogenic differentiation factor 1 | Q13562 | 425 | NEUROD1 | 4760 |
| 69 | Transmembrane protein 237 | Q96Q45 | 426 | TMEM237 | 65062 |
| 70 | Inward rectifier potassium channel 13 | O60928 | 427 | KCNJ13 | 3769 |
| 71 | S-arrestin | P10523 | 428 | SAG | 6295 |
| 72 | Secreted phosphoprotein 24 | Q13103 | 429 | SPP2 | 6694 |
| 73 | CCA IRNA nucleotidyltransferase 1, mitochondrial | Q96Q11 | 430 | TRNT1 | 51095 |
| 74 | Sodium bicarbonate cotransporter 3 | Q9Y6M7 | 431 | SLC4A7 | 9497 |
| 75 | Leucine zipper transcription factor-like protein 1 | Q9NQ48 | 432 | LZTFL1 | 54585 |
| 76 | Guanine nucleotide-binding protein G(t) subunit | P11488 | 433 | GNAT1 | 2779 |
| | alpha-1 | | | | |
| 77 | Three-prime repair exonuclease 1 | Q9NSU2 | 434 | TREX1 | 11277 |
| 78 | MAP kinase-activated protein kinase 3 | Q16644 | 435 | MAPKAPK3 | 7867 |
| 79 | Ataxin-7 | O15265 | 436 | ATXN7 | 6314 |
| 80 | Vitamin K-dependent protein S | P07225 | 437 | PROS1 | 5627 |
| 81 | ADP-ribosylation factor-like protein 6 | Q9HDF7 | 438 | ARL6 | 84100 |
| 82 | Interphotoreceptor matrix proteoglycan 2 | Q9BZV3 | 439 | IMPG2 | 50939 |
| 83 | IQ calmodulin-binding motif-containing protein 1 | Q15051 | 440 | IQCB1 | 9657 |
| 84 | Rhodopsin | P08100 | 441 | RHO | 6010 |
| 85 | Nephrocystin-3 | Q7Z494 | 442 | NPHP3 | 27031 |
| 86 | Clarin-1 | P58418 | 443 | CLRN1 | 7401 |
| 87 | Probable cationic amino acid transporter/Solute | Q8TBB6 | 444 | SLC7A14 | 57709 |
| | carrier family 7 member 14 | | | | |
| 88 | Choline-phosphate cytidylyltransferase A | P49585 | 445 | PCYT1A | 5130 |
| 89 | Centrosomal protein of 19 kDa | Q96LK0 | 446 | CEP19 | 84984 |
| 90 | Rod cGMP-specific 3′,5′-cyclic phosphodiesterase | P35913 | 447 | PDE6B | 5158 |
| | subunit beta | | | | |
| 91 | Wolframin | O76024 | 448 | WFS1 | 7466 |
| 92 | Homeobox protein HMX1 | Q9NP08 | 449 | HMX1 | 3166 |
| 93 | Ras-related protein Rab-28 | P51157 | 450 | RAB28 | 9364 |
| 94 | Coiled-coil and C2 domain-containing protein 2A | Q9P2K1 | 451 | CC2D2A | 57545 |
| 95 | Prominin-1 | O43490 | 452 | PROM1 | 8842 |
| 96 | Adhesion G protein-coupled receptor A3 | Q8IWK6 | 453 | ADGRA3 | 166647 |
| 97 | Death domain-containing protein 1 | Q6ZMT9 | 454 | DTHD1 | 401124 |
| 98 | WD repeat-containing protein 19 | Q8NEZ3 | 455 | WDR19 | 57728 |
| 99 | CGMP-gated cation channel alpha-1 | P29973 | 456 | CNGA1 | 1259 |
| 100 | CDGSH iron-sulfur domain-containing protein 2 | Q8NSK1 | 457 | CISD2 | 493856 |
| 101 | Microsomal triglyceride transfer protein large | P55157 | 458 | MTTP | 4547 |
| | subunit | | | | |
| 102 | Leucine-rich repeat, immunoglobulin-like domain | Q3SXY7 | 459 | LRIT3 | 345193 |
| | and transmembrane domain-containing protein 3 | | | | |
| 103 | Bardet-Biedl syndrome 7 protein | Q8IWZ6 | 460 | BBS7 | 55212 |
| 104 | Bardet-Biedl syndrome 12 protein | Q6ZW61 | 461 | BBS12 | 166379 |
| 105 | Major facilitator superfamily domain-containing | Q8NHS3 | 462 | MFSD8 | 256471 |
| | protein 8 | | | | |
| 106 | Serine/threonine-protein kinase PLK4 | O00444 | 463 | PLK4 | 10733 |
| 107 | Lecithin retinol acyltransferase | O95237 | 464 | LRAT | 9227 |
| 108 | Toll-like receptor 3 | O15455 | 465 | TLR3 | 7098 |
| 109 | Cytochrome P450 4V2 | Q6ZWL3 | 466 | CYP4V2 | 285440 |
| 110 | Spliceosome-associated protein CWC27 homolog | Q6UX04 | 467 | CWC27 | 10283 |
| 111 | Centrosomal protein POC5 | Q8NA72 | 468 | POC5 | 134359 |
| 112 | Versican core protein | P13611 | 469 | VCAN | 1462 |
| 113 | Adhesion G-protein coupled receptor V1 | Q8WXG9 | 470 | ADGRV1 | 84059 |
| 114 | COUP transcription factor 1 | P10589 | 471 | NR2F1 | 7025 |
| 115 | Mitochondrial outer membrane protein SLC25A46 | Q96AG3 | 472 | SLC25A46 | 91137 |
| 116 | Catenin alpha-1 | P35221 | 473 | CTNNA1 | 1495 |
| 117 | Histidine--tRNA ligase, cytoplasmic | P12081 | 474 | HARS1 | 3035 |
| 118 | Rod cGMP-specific 3′,5′-cyclic phosphodiesterase | P16499 | 475 | PDE6A | 5145 |
| | subunit alpha | | | | |
| 119 | Metabotropic glutamate receptor 6 | O15303 | 476 | GRM6 | 2916 |
| 120 | Serine/threonine-protein kinase MAK | P20794 | 477 | MAK | 4117 |
| 121 | Complement C2 | P06681 | 478 | C2 | 717 |
| 122 | Complement factor B | P00751 | 479 | CFB | 629 |
| 123 | Tubby-related protein 1 | O00294 | 480 | TULP1 | 7287 |
| 124 | Guanylyl cyclase-activating protein 1 | P43080 | 481 | GUCA1A | 2978 |
| 125 | Guanylyl cyclase-activating protein 2 | Q9UMX6 | 482 | GUCA1B | 2979 |
| 126 | Peripherin-2 | P23942 | 483 | PRPH2 | 5961 |
| 127 | Interphotoreceptor matrix proteoglycan 1 | Q17R60 | 484 | IMPG1 | 3617 |
| 128 | Protein eyes shut homolog | QST1H1 | 485 | EYS | 346007 |
| 129 | Collagen alpha-1(IX) chain | P20849 | 486 | COL9A1 | 1297 |
| 130 | Regulating synaptic membrane exocytosis protein | Q86UR5 | 487 | RIMS1 | 22999 |
| | 1 | | | | |
| 131 | Lebercilin | Q86VQ0 | 488 | LCA5 | 167691 |
| 132 | Elongation of very long chain fatty acids protein 4 | Q9GZR5 | 489 | ELOVL4 | 6785 |
| 133 | PR domain zinc finger protein 13 | Q9H4Q3 | 490 | PRDM13 | 59336 |
| 134 | Reticulon-4-interacting protein 1, mitochondrial | Q8WWV3 | 491 | RTN4IP1 | 84816 |
| 135 | Jouberin | Q8N157 | 492 | AHI1 | 54806 |
| 136 | Peroxisomal targeting signal 2 receptor | O00628 | 493 | PEX7 | 5191 |
| 137 | CCR4-NOT transcription complex subunit 9 | Q92600 | 494 | CNOT9 | 9125 |
| 138 | Aryl hydrocarbon receptor | P35869 | 495 | AHR | 196 |
| 139 | Kelch-like protein 7 | Q8IXQ5 | 496 | KLHL7 | 55975 |
| 140 | Retinitis pigmentosa 9 protein | Q8TA86 | 497 | RP9 | 6100 |
| 141 | Protein PTHB1 | Q3SYG4 | 498 | BBS9 | 27241 |
| 142 | Peroxisomal ATPase PEX1 | O43933 | 499 | PEX1 | 5189 |
| 143 | Tetraspanin-12 | O95859 | 500 | TSPAN12 | 23554 |
| 144 | Inosine-5′-monophosphate dehydrogenase 1 | P20839 | 501 | IMPDH1 | 3614 |
| 145 | Short-wave-sensitive opsin 1 | P03999 | 502 | OPN1SW | 611 |
| 146 | UPF0606 protein KIAA1549 | Q9HCM3 | 503 | KIAA1549 | 57670 |
| 147 | Retinitis pigmentosa 1-like 1 protein | Q8IWN7 | 504 | RP1L1 | 94137 |
| 148 | Disintegrin and metalloproteinase domain- | Q13443 | 505 | ADAM9 | 8754 |
| | containing protein 9 | | | | |
| 149 | Heparan-alpha-glucosaminide N-acetyltransferase | Q68CP4 | 506 | HGSNAT | 138050 |
| 150 | Oxygen-regulated protein 1 | P56715 | 507 | RP1 | 6101 |
| 151 | Alpha-tocopherol transfer protein | P49638 | 508 | TTPA | 7274 |
| 152 | Centrosome and spindle pole-associated protein 1 | Q1MSJ5 | 509 | CSPP1 | 79848 |
| 153 | Dynamin-like 120 kDa protein, mitochondrial | O60313 | 510 | OPA1 | 4976 |
| 154 | Peroxisome biogenesis factor 2 | P28328 | 511 | PEX2 | 5828 |
| 155 | Cyclic nucleotide-gated cation channel beta-3 | Q9NQW8 | 512 | CNGB3 | 54714 |
| 156 | Cilia- and flagella-associated protein 418 | Q96NL8 | 513 | CFAP418 | 157657 |
| 157 | Growth/differentiation factor 6 | Q6KF10 | 514 | GDF6 | 392255 |
| 158 | Regulating synaptic membrane exocytosis protein | Q9UQ26 | 515 | RIMS2 | 9699 |
| | 2 | | | | |
| 159 | Potassium voltage-gated channel subfamily V | Q8TDN2 | 516 | KCNV2 | 169522 |
| | member 2 | | | | |
| 160 | E3 ubiquitin-protein ligase Topors | Q9NS56 | 517 | TOPORS | 10210 |
| 161 | Centrosomal protein of 78 kDa | Q5JTW2 | 518 | CEP78 | 84131 |
| 162 | Inversin | Q9Y283 | 519 | INVS | 27130 |
| 163 | U4/U6 small nuclear ribonucleoprotein Prp4 | O43172 | 520 | PRPF4 | 9128 |
| 164 | Whirlin | Q9P202 | 521 | WHRN | 25861 |
| 165 | E3 ubiquitin-protein ligase TRIM32 | Q13049 | 522 | TRIM32 | 22954 |
| 166 | Toll-like receptor 4 | O00206 | 523 | TLR4 | 7099 |
| 167 | Cytoplasmic dynein 2 intermediate chain 2 | Q96EX3 | 524 | DYNC2I2 | 89891 |
| 168 | Programmed cell death protein 2 | Q16342 | 525 | PDCD2 | 5134 |
| 169 | Exosome complex component RRP4 | Q13868 | 526 | EXOSC2 | 23404 |
| 170 | Phosphatidylinositol polyphosphate 5-phosphatase | Q9NRR6 | 527 | INPP5E | 56623 |
| | type IV | | | | |
| 171 | Phytanoyl-CoA dioxygenese, peroxisomal | O14832 | 528 | PHYH | 5264 |
| 172 | Acyl-CoA-binding domain-containing protein | Q5T8D3 | 529 | ACBD5 | 91452 |
| 173 | Protocadherin-15 | Q96QU1 | 530 | PCDH15 | 65217 |
| 174 | Retinol-binding protein 3 | P10745 | 531 | RBP3 | 5949 |
| 175 | DNA excision repair protein ERCC-6 | Q03468 | 532 | ERCC6 | 2074 |
| 176 | Hexokinase-1 | P19367 | 533 | HK1 | 3098 |
| 177 | Cadherin-23 | Q9H251 | 534 | CDH23 | 64072 |
| 178 | Cadherin-related family member 1 | Q96JP9 | 535 | CDHR1 | 92211 |
| 179 | RPE-retinal G protein-coupled receptor | P47804 | 536 | RGR | 5995 |
| 180 | Kinesin-like protein KIF11 | P52732 | 537 | KIF11 | 3832 |
| 181 | Retinol-binding protein 4 | P02753 | 538 | RBP4 | 5950 |
| 182 | Cone cGMP-specific 3′,5′-cyclic phosphodiesterase | P51160 | 539 | PDE6C | 5146 |
| | subunit alpha | | | | |
| 183 | Paired box protein Pax-2 | Q02962 | 540 | PAX2 | 5076 |
| 184 | PDZ domain-containing protein 7 | Q9H5P4 | 541 | PDZD7 | 79955 |
| 185 | ADP-ribosylation factor-like protein 3 | P36405 | 542 | ARL3 | 403 |
| 186 | BBSome-interacting protein 1 | A8MTZ0 | 543 | BBIP1 | 92482 |
| 187 | Age-related maculopathy susceptibility protein 2 | P0C7Q2 | 544 | ARMS2 | 387715 |
| 188 | Serine protease HTRA1 | Q92743 | 545 | HTRA1 | 5654 |
| 189 | Ornithine aminotransferase, mitochondrial | P04181 | 546 | OAT | 4942 |
| 190 | Zinc finger protein 408 | Q9H9D4 | 547 | ZNF408 | 79797 |
| 191 | Tubby protein homolog | P50607 | 548 | TUB | 7275 |
| 192 | Transcriptional enhancer factor TEF-1 | P28347 | 549 | TEAD1 | 7003 |
| 193 | Harmonin | Q9Y6N9 | 550 | USHIC | 10083 |
| 194 | Transmembrane protein 216 | Q9P0N5 | 551 | TMEM216 | 51259 |
| 195 | Bestrophin-1 | O76090 | 552 | BEST1 | 7439 |
| 196 | Isoaspartyl peptidase/L-asparaginase | Q71266 | 553 | ASRGL1 | 80150 |
| 197 | Rod outer segment membrane protein 1 | Q03395 | 554 | ROM1 | 6094 |
| 198 | Bardet-Biedl syndrome 1 protein | Q8NFJ9 | 555 | BBS1 | 582 |
| 199 | Calcium-binding protein 4 | P57796 | 556 | CABP4 | 57010 |
| 200 | Low-density lipoprotein receptor-related protein 5 | O75197 | 557 | LRPS | 4041 |
| 201 | Calpain-5 | O15484 | 558 | CAPN5 | 726 |
| 202 | Unconventional myosin-VIIa | Q13402 | 559 | MYO7A | 4647 |
| 203 | Transmembrane protein 126A | Q9H061 | 560 | TMEM126A | 84233 |
| 204 | Frizzled-4 | Q9ULV1 | 561 | FZD4 | 8322 |
| 205 | Cytoplasmic dynein 2 light intermediate chain 1 | Q8TCX1 | 562 | DYNC2LI1 | 51626 |
| 206 | Centrosomal protein of 164 kDa | Q9UPV0 | 563 | CEP164 | 22897 |
| 207 | Complement C1q tumor necrosis factor-related | Q9BXJ0 | 564 | C1QTNF5 | 114902 |
| | protein 5 | | | | |
| 208 | Membrane frizzled-related protein | Q9BY79 | 565 | MFRP | 83552 |
| 209 | Voltage-dependent calcium channel subunit alpha- | Q7Z357 | 566 | CACNA2D4 | 93589 |
| | 2/delta-4 | | | | |
| 210 | Guanine nucleotide-binding protein G(I)/G(S)/G(T) | P16520 | 567 | GNB3 | 2784 |
| | subunit beta-3 | | | | |
| 211 | Retinal cone rhodopsin-sensitive cGMP 3′,5′-cyclic | Q13956 | 568 | PDE6H | 5149 |
| | phosphodiesterase subunit gamma | | | | |
| 212 | Collagen alpha-1(II) chain | P02458 | 569 | COL2A1 | 1280 |
| 213 | Matrix metalloproteinase-19 | Q99542 | 570 | MMP19 | 4327 |
| 214 | Retinol dehydrogenase 5 | Q92781 | 571 | RDH5 | 5959 |
| 215 | T-complex protein 1 subunit beta | P78371 | 572 | CCT2 | 10576 |
| 216 | Bardet-Biedl syndrome 10 protein | Q8TAM1 | 573 | BBS10 | 79738 |
| 217 | Centrosomal protein of 290 kDa | O15078 | 574 | CEP290 | 80184 |
| 218 | POC1 centriolar protein homolog B | Q8TC44 | 575 | POC1B | 282809 |
| 219 | Mevalonate kinase | Q03426 | 576 | MVK | 4598 |
| 220 | Intraflagellar transport protein 81 homolog | Q8WYA0 | 577 | IFT81 | 28981 |
| 221 | Mitochondrial translation release factor in rescue | Q9H3J6 | 578 | MTRFR | 91574 |
| 222 | Integral membrane protein 2B | Q9Y287 | 579 | ITM2B | 9445 |
| 223 | Retinoblastoma-associated protein | P06400 | 580 | RB1 | 5925 |
| 224 | RCC1 and BTB domain-containing protein 1 | Q8NDN9 | 581 | RCBT81 | 55213 |
| 225 | Rhodopsin kinase GRK1 | Q15835 | 582 | GRK1 | 6011 |
| 226 | X-linked retinitis pigmentosa GTPase regulator- | Q96KN7 | 583 | RPGRIP1 | 57096 |
| | interacting protein 1 | | | | |
| 227 | Neural retina-specific leucine zipper protein | P54845 | 584 | NRL | 4901 |
| 228 | Homeobox protein OTX2 | P32243 | 585 | OTX2 | 5015 |
| 229 | Retinol dehydrogenase 11 | Q8TC12 | 586 | RDH11 | 51109 |
| 230 | Retinol dehydrogenase 12 | Q96NR8 | 587 | RDH12 | 145226 |
| 231 | Tubulin polyglutamylase TTLL5 | Q6EMB2 | 588 | TTLL5 | 23093 |
| 232 | Spermatogenesis-associated protein 7 | Q9P0W8 | 589 | SPATA7 | 55812 |
| 233 | Tetratricopeptide repeat protein 8 | Q8TAM2 | 590 | TTC8 | 123016 |
| 234 | Fibulin-5 | Q9UBXS | 591 | FBLNS | 10516 |
| 235 | Transient receptor potential cation channel | Q7Z4N2 | 592 | TRPM1 | 4308 |
| | subfamily M member 1 | | | | |
| 236 | Gamma-tubulin complex component 4 | Q9UGJ1 | 593 | TUBGCP4 | 27229 |
| 237 | Sodium/potassium/calcium exchanger 1 | O60721 | 594 | SLC24A1 | 9187 |
| 238 | Photoreceptor-specific nuclear receptor | Q9Y5X4 | 595 | NR2E3 | 10002 |
| 239 | Bardet-Biedl syndrome 4 protein | Q96RK4 | 596 | BBS4 | 585 |
| 240 | Calcium and integrin-binding family member 2 | O75838 | 597 | CIB2 | 10518 |
| 241 | Retinaldehyde-binding protein 1 | P12271 | 598 | RLBP1 | 6017 |
| 242 | N-acetylglucosamine-1-phosphotransferase | Q9UJJ9 | 599 | GNPTG | 84572 |
| | subunit gamma | | | | |
| 243 | Intraflagellar transport protein 140 homolog | Q96RY7 | 600 | IFT140 | 9742 |
| 244 | Clusterin-associated protein 1 | Q96AJ1 | 601 | CLUAP1 | 23059 |
| 245 | ATP-binding cassette sub-family C member 6 | O95255 | 602 | ABCC6 | 368 |
| 246 | Ketimine reductase mu-crystallin | Q14894 | 603 | CRYM | 1428 |
| 247 | Battenin | Q13286 | 604 | CLN3 | 1201 |
| 248 | Zinc finger protein 423 | Q2M1K9 | 605 | ZNF423 | 23090 |
| 249 | Protein fantom | Q68CZ1 | 606 | RPGRIP1L | 23322 |
| 250 | Bardet-Biedl syndrome 2 protein | Q9BXC9 | 607 | BBS2 | 583 |
| 251 | ADP-ribosylation factor-like protein 2-binding | Q9Y2Y0 | 608 | ARL2BP | 23568 |
| | protein | | | | |
| 252 | Cyclic nucleotide-gated cation channel beta-1 | Q14028 | 609 | CNGB1 | 1258 |
| 253 | Cadherin-3 | P22223 | 610 | CDH3 | 1001 |
| 254 | Pre-mRNA-splicing factor ATP-dependent RNA | Q92620 | 611 | DHX38 | 9785 |
| | helicase PRP16 | | | | |
| 255 | A disintegrin and metalloproteinase with | Q8TE60 | 612 | ADAMTS18 | 170692 |
| | thrombospondin motifs 18 | | | | |
| 256 | Solute carrier family 38 member 8 | A6NNN8 | 613 | SLC38A8 | 146167 |
| 257 | Retinal guanylyl cyclase 1 | Q02846 | 614 | GUCY2D | 3000 |
| 258 | Pre-mRNA-processing-splicing factor 8 | Q6P209 | 615 | PRPF8 | 10594 |
| 259 | Aryl-hydrocarbon-interacting protein-like 1 | Q9NZN9 | 616 | AIPL1 | 23746 |
| 260 | Membrane-associated phosphatidylinositol | Q9BZ71 | 617 | PITPNM3 | 83394 |
| | transfer protein 3 | | | | |
| 261 | Protein unc-119 homolog A | Q13432 | 618 | UNC119 | 9094 |
| 262 | Probable G-protein coupled receptor 179 | Q6PRD1 | 619 | GPR179 | 440435 |
| 263 | Tectonic-like complex member MKS1 | Q9NXB0 | 620 | MKS1 | 54903 |
| 264 | Carbonic anhydrase 4 | P22748 | 621 | CA4 | 762 |
| 265 | Regulator of G-protein signaling 9 | O75916 | 622 | RGS9 | 8787 |
| 266 | Arylsulfatase G | Q96EG1 | 623 | ARSG | 22901 |
| 267 | pre-mRNA splicing regulator USH1G | Q495M9 | 624 | USH1G | 124590 |
| 268 | Photoreceptor disk component PRCD | Q00LT1 | 625 | PRCD | 768206 |
| 269 | Fascin-2 | O14926 | 626 | FSCN2 | 25794 |
| 270 | Retinal rod rhodopsin-sensitive cGMP 3′,5′-cyclic | P18545 | 627 | PDE6G | 5148 |
| | phosphodiesterase subunit gamma | | | | |
| 271 | Laminin subunit alpha-1 | P25391 | 628 | LAMA1 | 284217 |
| 272 | AFG3-like protein 2 | Q9Y4W6 | 629 | AFG3L2 | 10939 |
| 273 | Cone-rod homeobox protein | O43186 | 630 | CRX | 1406 |
| 274 | Receptor expression-enhancing protein 6 | Q96HR9 | 631 | REEP6 | 92840 |
| 275 | Retina and anterior neural fold homeobox protein | Q96IS3 | 632 | RAX2 | 84839 |
| | 2 | | | | |
| 276 | Complement C3 | P01024 | 633 | C3 | 718 |
| 277 | Rho guanine nucleotide exchange factor 18 | Q6ZSZ5 | 634 | ARHGEF18 | 23370 |
| 278 | Patatin-like phospholipase domain-containing | Q8IY17 | 635 | PNPLA6 | 10908 |
| | protein 6 | | | | |
| 279 | Regulator of G-protein signaling 9-binding protein | Q6ZS82 | 636 | RGS9BP | 388531 |
| 280 | Optic atrophy 3 protein | Q9H6K4 | 637 | OPA3 | 80207 |
| 281 | U4/U6 small nuclear ribonucleoprotein Prp31 | Q8WWY3 | 638 | PRPF31 | 26121 |
| 282 | Isocitrate dehydrogenase [NAD] subunit beta, | O43837 | 639 | IDH3B | 3420 |
| | mitochondrial | | | | |
| 283 | Pantothenate kinase 2, mitochondrial | Q9BZ23 | 640 | PANK2 | 80025 |
| 284 | Protein jagged-1 | P78504 | 641 | JAG1 | 182 |
| 285 | Molecular chaperone MKKS | Q9NPJ1 | 642 | MKKS | 8195 |
| 286 | Centrosomal protein kizuna | Q2M2Z5 | 643 | KIZ | 55857 |
| 287 | Lysophosphatidylserine lipase ABHD12 | Q8N2K0 | 644 | ABHD12 | 26090 |
| 288 | Kinesin-like protein KIF3B | O15066 | 645 | KIF3B | 9371 |
| 289 | Centrosome-associated protein CEP250 | Q9BV73 | 646 | CEP250 | 11190 |
| 290 | Pre-mRNA-processing factor 6 | O94906 | 647 | PRPF6 | 24148 |
| 291 | Cilia- and flagella-associated protein 410 | O43822 | 648 | CFAP410 | 755 |
| 292 | Dynamin-1-like protein | O00429 | 649 | DNM1L | 10059 |
| 293 | Metalloproteinase inhibitor 3 | P35625 | 650 | TIMP3 | 7078 |
| 294 | Intraflagellar transport protein 27 homolog | Q9BW83 | 651 | IFT27 | 11020 |
| 295 | Fibulin-1 | P23142 | 652 | FBLN1 | 2192 |
| 296 | MIEF1 upstream open reading frame protein | L0R8F8 | 653 | MIEF1 | |
| 297 | Aconitate hydratase, mitochondrial | Q99798 | 654 | ACO2 | 50 |
| 298 | Gamma-tubulin complex component 6 | Q96RT7 | 655 | TUBGCP6 | 85378 |
| 299 | Centriole and centriolar satellite protein | O75665 | 656 | OFD1 | 8481 |
| 300 | Retinoschisin | O15537 | 657 | RS1 | 6247 |
| 301 | Protein XRP2 | O75695 | 658 | RP2 | 6102 |
| 302 | Dystrophin | P11532 | 659 | DMD | 1756 |
| 303 | X-linked retinitis pigmentosa GTPase regulator | Q92834 | 660 | RPGR | 6103 |
| 304 | Nyctalopin | Q9GZU5 | 661 | NYX | 60506 |
| 305 | Xaa-Pro dipeptidase | P12955 | 662 | PEPC | 5184 |
| 306 | Norrin | Q00604 | 663 | NDP | 4693 |
| 307 | Voltage-dependent L-type calcium channel subunit | O60840 | 664 | CACNA1F | 778 |
| | alpha-1F | | | | |
| 308 | Phosphoglycerate kinase 1 | P00558 | 665 | PGK1 | 5230 |
| 309 | Rab proteins geranylgeranyltransferase | P24386 | 666 | CHM | 1121 |
| | component A 1 | | | | |
| 310 | Mitochondrial import inner membrane translocase | O60220 | 667 | TIMM8A | 1678 |
| | subunit Tim8 A | | | | |
| 311 | Ribose-phosphate pyrophosphokinase 1 | P60891 | 668 | PRPS1 | 5631 |
| 312 | Long-wave-sensitive opsin 1 | P04000 | 669 | OPN1LW | 5956 |
| 313 | Medium-wave-sensitive opsin 1 | P04001 | 670 | OPN1MW | 2652 |
| 314 | Short-wave-sensitive opsin 1 | P03999 | 671 | OPN1SW | 611 |
| 315 | Transcription factor A, mitochondrial | Q00059 | 672 | TFAM | 7019 |
| 316 | NADH-ubiquinone oxidoreductase chain 1 | P03886 | 673 | MT-ND1 | 4535 |
| 317 | NADH-ubiquinone oxidoreductase chain 2 | P03891 | 674 | MT-ND2 | 4536 |
| 318 | NADH-ubiquinone oxidoreductase chain 3 | P03897 | 675 | MT-ND3 | 4537 |
| 319 | NADH-ubiquinone oxidoreductase chain 4L | P03901 | 676 | MT-ND4L | 4539 |
| 320 | NADH-ubiquinone oxidoreductase chain 4 | P03905 | 677 | MT-ND4 | 4538 |
| 321 | NADH-ubiquinone oxidoreductase chain 5 | P03915 | 678 | MT-ND5 | 4540 |
| 322 | NADH-ubiquinone oxidoreductase chain 6 | P03923 | 679 | MT-ND6 | 4541 |
| 323 | ATP synthase subunit a | P00846 | 680 | MT-ATP6 | 4508 |
| 324 | ATP synthase protein 8 | P03928 | 681 | MT-ATP8 | 4509 |
| 325 | Cytochrome c oxidase subunit 1 | P00395 | 682 | MT-CO1 | 4512 |
| 326 | Cytochrome c oxidase subunit 3 | P00414 | 683 | MT-CO3 | 4514 |
| 327 | Cytochrome b | P00156 | 684 | MT-CYB | 4519 |
| 328 | Leucine--tRNA ligase, mitochondrial | Q15031 | 685 | LARS2 | 23395 |
| 329 | Nondiscriminating glutamyl-tRNA synthetase | Q5JPH6 | 686 | EARS2 | 124454 |
| | EARS2, mitochondrial | | | | |
| 330 | Lysine--tRNA ligase | Q15046 | 687 | KARS1 | 3735 |
| 331 | Histidine--tRNA ligase, mitochondrial | P49590 | 688 | HARS2 | 23438 |
| 332 | Serine--tRNA ligase, mitochondrial | Q9NP81 | 689 | SARS2 | 54938 |
| 333 | Probable proline--tRNA ligase, mitochondrial | Q7L3T8 | 690 | PARS2 | 25973 |
| 334 | Cyanocobalamin reductase/alkylcobalamin | Q9Y4U1 | 691 | MMACHC | 25974 |
| | dealkylase | | | | |
| 335 | POU domain, class 3, transcription factor 4 | P49335 | 692 | POU3F4 | 5456 |
| 336 | Ribosomal protein S6 kinase alpha-6 | Q9UK32 | 693 | RPSGKA6 | 27330 |
| 337 | Ciliogenesis and planar polarity effector 1 | Q9H799 | 694 | CPLANE1 | 65250 |
| 338 | Meckelin | Q5HYA8 | 695 | TMEM67 | 91147 |
| 339 | TRAF3-interacting protein 1 | Q8TDR0 | 696 | TRAF3IP1 | 26146 |
| 340 | Intraflagellar transport protein 74 homolog | Q96LB3 | 697 | IFT74 | 80173 |
| 341 | S phase cyclin A-associated protein in the | Q9BY12 | 698 | SCAPER | 49855 |
| | endoplasmic reticulum | | | | |
| 342 | Sodium channel and clathrin linker 1 | Q96NL6 | 699 | SCLT1 | 132320 |
| 343 | Protein TALPID3 | Q98VV6 | 700 | KIAA0586 | 9786 |
| 344 | Tectonic-2 | Q96GX1 | 701 | TCTN2 | 79867 |
| 345 | ADP-ribosylation factor-like protein 13B | Q3SXY8 | 702 | ARL13B | 200894 |
| 346 | B9 domain-containing protein 1 | Q9UPM9 | 703 | B9D1 | 27077 |
| 347 | B9 domain-containing protein 2 | Q9BPU9 | 704 | B9D2 | 80776 |
| 348 | C2 domain-containing protein 3 | Q4AC94 | 705 | C2CD3 | 26005 |
| 349 | Centrosomal protein of 41 kDa | Q9BYV8 | 706 | CEP41 | 95681 |
| 350 | Centrosomal protein of 104 kDa | O60308 | 707 | CEP104 | 9731 |
| 351 | Centrosomal protein of 120 kDa | Q8N960 | 708 | CEP120 | 153241 |
| 352 | Intraflagellar transport protein 172 homolog | Q9UG01 | 709 | IFT172 | 26160 |
| 353 | Katanin-interacting protein | O60303 | 710 | KATNIP | 23247 |
| 354 | Kinesin-like protein KIF7 | Q2M1P5 | 711 | KIF7 | 374654 |
| 355 | Retinal rod rhodopsin-sensitive cGMP 3′,5′-cyclic | O43924 | 712 | PDE6D | 5147 |
| | phosphodiesterase subunit delta | | | | |
| 356 | Tectonic-1 | Q2MV58 | 713 | TCTN1 | 79600 |
| 357 | Tectonic-3 | Q6NUS6 | 714 | TCTN3 | 26123 |
| 358 | Transmembrane protein 107 | Q6UX40 | 715 | TMEM107 | 84314 |
| 359 | Transmembrane protein 138 | Q9NPI0 | 716 | TMEM138 | 51524 |
| 360 | Transmembrane protein 231 | Q9H6L2 | 717 | TMEM231 | 79583 |
| 361 | Tetratricopeptide repeat protein 21B | Q7Z4L5 | 718 | TTC21B | 79809 |
| 362 | Nuclear receptor ROR-alpha | P35398 | 719 | RORA | 6095 |
| 363 | Beta-nerve growth factor | P01138 | 720 | NGF | 4803 |
| 364 | Collagen alpha-2(VIII) chain | P25067 | 721 | COL8A2 | 1296 |
| 365 | Solute carrier family 4 member 11 | Q8NBS3 | 722 | SLC4A11 | 83959 |
| 366 | Zinc finger E-box-binding homeobox 1 | P37275 | 723 | ZEB1 | 6935 |
| 367 | Keratin, type II cuticular Hb3 | P78385 | 724 | KRT83 | 3889 |
| 368 | Keratin, type I cytoskeletal 12 | Q99456 | 725 | KRT12 | 3859 |
| 369 | Transforming growth factor-beta-induced protein | Q15582 | 726 | TGFBI | 7045 |
| | ig-h3 | | | | |
| 370 | Tumor-associated calcium signal transducer 2 | P09758 | 727 | TACSTD2 | 4070 |
| 371 | Carbohydrate sulfotransferase 6 | Q9GZX3 | 728 | CHST6 | 4166 |
| 372 | Gelsolin | P06396 | 729 | GSN | 2934 |
| 373 | UbiA prenyltransferase domain-containing protein | Q9Y5Z9 | 730 | UBIAD1 | 29914 |
| | 1 | | | | |
| 374 | Decorin | P07585 | 731 | DCN | 1634 |
| 375 | 1-phosphatidylinositol 3-phosphate 5-kinase | Q9Y2I7 | 732 | PIKFYVE | 200576 |
| 376 | Transcription factor Ovo-like 2 | Q9BRP0 | 733 | OVOL2 | 58495 |
| 377 | Grainyhead-like protein 2 homolog | Q6ISB3 | 734 | GRHL2 | 79977 |

### Example 2: Evaluation of Expression of an HSV Reporter by Various Routes of Administration In Vivo

[0253] The present study evaluated the expression of an HSV reporter construct (termed HSV-mCherry) in the eye following various routes of administration to the eye.

[0254] All procedures conducted were in compliance with applicable animal welfare acts and were approved by the local Institutional Animal Care and Use Committee (IACUC). 18 healthy, 8-week-old female C57BL/6 mice were used in this study.

[0255] Mice were anesthesized with Ketamine and Xylazine via intraperitoneal injection at 85 mg/kg and 14 mg/kg, respectively.

[0256] Table 2 provides a synopsis of the experimental design. At 24-hours after the indicated route of administration of test article, plasma samples were collected then animals were sacrificed. Eyeballs were embedded in paraffin for downstream analysis.

TABLE 2
Study Design and Test Article (TA) Administration

| | | | Treatment | |
|---|---|---|---|---|
| Arm | Test System | Treatment | Details | Assessment |
| 1 | C57BL/6 | Test Article | Intracameral | Terminal plasma collection at |
| | mice (n = 3) | 1 | (IC), bilateral | Day 2 (24 hours ± 30 min post- |
| | | | 1 μl/eye | administration); |
| 2 | C57BL/6 | Test Article | Suprachoroidal | Terminal enucleation at Day 2 |
| | mice (n = 3) | 1 | (SCS), bilateral | with enucleation and fixation |
| | | | 1 μl/eye | of whole eyes (n = 3 mice/arms |
| 3 | C57BL/6 | Test Article | Intravitreal | 1-4), |
| | mice (n = 3) | 1 | (IVT), bilateral | or enucleation of eyes and |
| | | | 1 μl/eye | eyelids, separately with |
| 4 | C57BL/6 | Test Article | Subretinal, | fixation (n = 3 right eye/Arm 5 |
| | mice (n = 3) | 1 | bilateral | only), |
| | | | 1 μl/eye | or enucleation of eyes and |
| 5 | C57BL/6 | None | None | eyelids together with fixation |
| | mice (n = 3) | | | |

[0257] For intracameral administration, animals were anesthetized and the eyes were dilated. Following sedation and dilation, a pilot hole was made about 1.5 mm anterior to the limbus using a 31-gauge needle by inserting the needle to bevel depth into the aqueous humor. A 1 μl air bubble was first injected into the anterior chamber through the pilot hole using a syringe and a 33-gauge beveled needle to prevent reflux. Next, a total volume of 1 μl of test article (1.16×10¹⁰ PFU/mL) per eye was injected over a period of 5-10 minutes. Care was taken to avoid damaging the iris and lens. Following injection, saline was used to rinse and hydrate the eye. Antibiotic ointment was then applied to the injection site and the animals were monitored until fully awake.

[0258] For suprachoroidal administration, eyes were dilated with 1% cyclopentolate hydrochloride ophthalmic solution and 10% phenylephrine prior to injection. Following administration of Ketamine and Xylazine, the animals were placed on a regulated heating pad, and the temporal region of sclera was visualized under magnification. An 8 mm 31-gauge insulin syringe was used to puncture the sclera about 1-1.5 mm below the corneal limbus, avoiding tears through the retinal pigment epithelial (RPE)/Choroid, retina, or vitreous body. The suprachoroidal injections were performed using a 10 μl syringe with a 33-gauge 45 degree beveled needle inserted through the scleral puncture, with the bevel aimed upward toward the cornea to complete the scleral tear. A total volume of 1 μL of test article (1.16×10¹⁰ PFU/mL) was delivered per eye. Successful injections were assessed through a dissection microscope and lacked any blood in the vitreous or light reflection from test agent flowing into the vitreous space or scratches of lens.

[0259] For intravitreal administration, animals were anesthetized and eyes were dilated. Following sedation and dilation, a total volume of 5 μL of test article (1.16×10¹⁰ PFU/mL) per eye was injected into the vitreous at the pars plana using a syringe and a 33-gauge needle.

[0260] For subretinal injection, mouse eyes were dilated and the animals were anesthetized. The mice were placed on a regulated heating pad, and the posterior pole was visualized under magnification. A 12.7 mm 30-gauge insulin syringe was used to puncture the cornea just above the corneal limbus, avoiding any contact with the sclera and lens. The transvitreal subretinal injections were performed using a 10 μL syringe with a 33-gauge blunt needle inserted through the corneal puncture across the vitreous, with the shaft aimed at the back of the eyecup, avoiding any trauma to the lens or iris. A total volume of 1 μL of test article (1.16×10¹⁰ PFU/mL) was delivered.

[0261] Systemic vector (HSV-mCherry) exposure was assessed in plasma samples collected 24-hours after test article administration (FIG. 2). As shown in FIG. 2, minimal systemic vector DNA was detected (e.g. at or below the limit of detection of about 100 copies of mCherry DNA/50 ng total DNA). Further, and as determined by hematoxylin and eosin (H&E) staining, very few inflammatory cells were observed in the suprachoroidal (FIG. 4G) and subretinal (FIG. 6G) groups, while the intracameral (FIG. 3A) and intravitreal (FIG. 5F) groups showed mild inflammatory cell infiltration.

[0262] Next, HSV-mCherry expression was assessed 24-hours post intracameral, suprachoroidal, intravitreal, or subretinal administration. As shown in FIGS. 3A-3F, intracameral administration resulted in reporter expression in at least the ciliary body, iris, and/or corneal endothelial cells. Reporter expression was observed across the retina including in retinal pigment epithelial (RPE) cells and/or the photoreceptor retinal area following suprachoroidal administration (FIGS. 4A-4F). FIGS. 5A-5E show reporter expression in the ciliary body, iris, corneal epithelium, corneal endothelium, and/or the outside layer of retina (potentially retinal ganglion cells) following intravitreal administration. Finally, subretinal administration resulted in reporter expression in the retinal area across the retina (not just localized to the injection site) including in at least the photoreceptor retinal area and RPE cells (FIGS. 6A-6F). Taken together, these data indicate reporter expression via various routes of administration to the eye. Importantly, no fibrosis, necrosis, or other gross physiologic defects (as indicated by histology) were noted in the eye 24 hours after any route of vector administration, indicating the vector is safe in the eye.

[0263] Taken together, these data suggest the HSV-based vector described herein was capable of transducing multiple clinically-relevant cell types in the eye, including both photoreceptors and retinal pigment epithelial cells in the retina, with little-to-no inflammation.

### Example 3: In Vitro Analysis of a Modified Herpes Simplex Virus Human Encoding Beta-Nerve Growth Factor (bNGF)

[0264] The following example describes the use of a recombinant herpes simplex virus type 1 (HSV-1) that successfully encoded human beta-nerve growth factor (bNGF) (see e.g. SEQ ID NOs: 720, 735, 736, 741, 742, and 743) and expressed full-length human bNGF (see SEQ ID NOs: 363, 739, and 740) protein.

[0265] A recombinant HSV-1 was engineered to incorporate a human pro-NGF (see SEQ ID NO: 735) expression cassette, and a recombinant HSV-1 was engineered to incorporate a human NGF (see SEQ ID NO: 736) expression cassette. Both recombinant HSV-1 vectors contained a heterologous promoter and polyA sequence (see Example 1). Viral plaques putatively containing the human NGF cassettes were picked and screened by infection in a complementing cell line. High expressing clones, termed HSV-proNGF and HSV-sNGF, were subsequently selected for additional in vitro analysis.

[0266] Initially, vector genomes and NGF transcripts derived from HSV-proNGF and HSV-sNGF were measured in primary corneal epithelial cells. Briefly, sequenced titered material was used to infect primary corneal epithelial cells in 6-well plates at a multiplicity of infection (MOI) of 0, 1, or 4. DNA and RNA were isolated 24 or 48 hours post infection (hpi) from cellular pellets and vector genomes (DNA) and NGF transcripts (RNA) was measured by qPCR and qRT-PCR, respectively. As shown in FIGS. 7A-7D, a direct relationship was observed in vector genome and NGF transcript quantification with both HSV-proNGF (FIGS. 7A & 7C) and HSV-sNGF (FIGS. 7B & 7D) infection of primary corneal epithelial cells dose at 24 hpi (FIGS. 7A-7B) and 48 hpi (FIGS. 7C-7D).

[0267] Next, western blot analysis was conducted to measure expression of correctly processed bNGF protein from the engineered HSV-proNGF vector. Primary corneal epithelial cells were mock infected with vehicle control or were infected with HSV-proNGF at an MOI of 1 or 4. 48 hours post-infection, media was collected and normalized for protein content by ELISA (FIG. 8A: 8-10 ng of total protein was loaded; FIG. 8B: 115-140 ng of total protein was loaded). Samples were run on a 4-20% acrylamide gel. Recombinant human bNGF was loaded on the gel as a positive control. As shown in FIGS. 8A-8B, while no human bNGF was detected in the uninfected control cells, robust expression of human bNGF was observed after infection with HSV-proNGF.

[0268] Because NGF is a naturally secreted protein, primary corneal epithelial cell culture supernatants were also harvested and tested for the presence of the HSV derived human bNGF by ELISA. In line with the western blot data, HSV derived human bNGF protein was detected in the supernatants of primary corneal epithelial cells infected with HSV-proNGF and HSV-sNGF at the MOIs tested (FIGS. 9A-9B), suggesting that the full length human protein was being properly processed/secreted after expression from the recombinant vector.

[0269] Next, an MTT assay was performed to measure cell toxicity following infection of primary corneal epithelial cells with HSV-proNGF or HSV-sNGF. Briefly, primary corneal epithelial cells were plated at 2×10⁴ cells/well in a 96-well plate. 24-hours after plating, cells were infected with a control virus, HSV-proNGF, or HSV-sNGF at an MOI of 0, 0.5, 1, or 3. An MTT assay was performed 24- and 48-hours post-infection. As shown in FIGS. 10A-10B, cell viability remained intact at the time points and MOIs tested, suggesting minimal cellular toxicity after infection with HSV-proNGF or HSV-sNGF.

[0270] Finally, vector derived bNGF function was determined based on a TF-1 cell proliferation activity assay. Briefly, TF-1 cells were plated at 1.4×10⁴ cells/well in a 96-well plate. The TF-1 cells were then placed in varying concentrations of recombinant human bNGF protein, or in media from HEK-293T cells which had been infected with HSV-proNGF or HSV-sNGF (NGF levels in media from infected HEK-293T cells was determined by ELISA). TF-1 cells were grown for 72 hours following bNGF addition, and a Cell Titer Assay was performed to measure TF-1 cell proliferation as a function of bNGF activity. As shown in FIGS. 11A-11B, bNGF derived from HSV-proNGF (FIG. 11A) and HSV-sNGF (FIG. 11B) promoted the proliferation of TF-1 cells in a comparable or greater fashion to that of recombinant human bNGF.

[0271] Take together, the data presented in this example indicated that recombinant HSV-1 vectors HSV-proNGF and HSV-sNGF efficiently infected primary cells of the eye and were capable of expressing the human NGF transgenes encoded therein. Further, the data indicated that the exogenous human protein was subsequently (properly) secreted from infected cells. Further, the recombinant human bNGF protein made from the recombinant herpes simplex virus was at least as, if not more, bioactive as commercially available recombinant bNGF protein without inducing cellular toxicity.

[0272] Without wishing to be bound by theory, it is believed that these data further support the use of engineered herpes simplex viruses as novel, targeted, broadly applicable gene therapy vectors for the treatment of conditions involving the eye.

### Example 4: Evaluation of Expression of an HSV Reporter Topically Applied In Vivo Following Corneal Injury

[0273] The present study evaluated the expression of a topically applied HSV reporter construct (termed HSV-mCHerry) in corneal wounded eyes.

[0274] All procedures conducted were in compliance with applicable animal welfare acts and were approved by the local Institutional Animal Care and Use Committee (IACUC). 15 healthy, 8-week-old female C57BL/6 mice were used in this study.

[0275] Mice were anesthetized with Ketamine and Xylazine via intraperitoneal injection at 85 mg/kg and 14 mg/kg, respectively.

[0276] Table 3 provides a synopsis of the experimental design. At 24-hours after topical administration of test article, the animals were sacrificed. Test article administration occurred immediately following the indicated corneal wounding procedure and while the animals were still anesthetized. Eyeballs were either embedded in paraffin or snap frozen for downstream analysis.

TABLE 3
Study Design and Test Article (TA) Administration

| | Test | | | Treatment | |
|---|---|---|---|---|---|
| Arm | System | Induction | Test Article | Details | Assessment |
| 1 | C57BL/6 | Bilateral 1 | HSV-mCherry | Topical, | Terminal blood collection at |
| | mice (n = 4; | mm | | bilateral | Day 2 (24 hours ± 30 min |
| | n = 8 eyes) | mechanical | | 3 μl/eye | post-administration); |
| | | wounding | | | Terminal enucleation of |
| 2 | C57BL/6 | Bilateral 1 | HSV-mCherry | Topical, | whole eyes with fixation and |
| | mice (n = 4; | mm | | bilateral | paraffin embedding (n = 5 |
| | n = 8 eyes) | (deeper) | | 3 μl/eye | eyes/arms 1-3), |
| | | mechanical | | | Terminal collection of |
| | | wounding | | | corneal epithelium and eyes |
| 3 | C57BL/6 | Bilateral | HSV-mCherry | Topical, | without epithelium collected |
| | mice (n = 4; | crosshatch | | bilateral | in RNAlater (n = 3 eye/arms 1- |
| | n = 8 eyes) | wound to | | 3 μl/eye | 3; n = 6 eyes, Arm 4) |
| | | both eyes | | | |
| 4 | C57BL/6 | None | None | None | |
| | mice (n = 3) | | | | |

[0277] Baseline corneal fluorescein staining was conducted in order to exclude animals with preexisting corneal injury. On day 1, bilateral 1 mm mechanical debridement wounds were created by an Alger Brush II, or a 5×5 cornea-wide crosshatch wound was created. Also at day 1, and immediately after corneal wounding and prior to test article administration, fluorescein staining of one eye in each arm was conducted to confirm corneal wounding. Topical administration of test article (3 μl of HSV-mCherry at a concentration of 1.16×10¹⁰ PFU/mL) was applied to the wounded eyes, and 24-hours post test article administration, terminal collection of whole eyes with fixation and paraffin embedding occurred. Alternatively, terminal enucleation of whole eyes with dissection of corneal epithelium and processing of whole eyes and epithelium, separately, in RNAlater was conducted.

[0278] As shown in FIGS. 12A-12C, fluorescein staining showed robust corneal wounding in all three models tested (FIG. 12A, 1 mm wound; FIG. 12B, 1 mm deep wound; and FIG. 12C, crosshatch wound). Corneal wounding was further confirmed by H&E staining (FIGS. 13A-13C) which showed disruption of the outer corneal epithelial layer in all wound models tested. In addition, the 1 mm deep wound group also showed disruption of the lower stromal layer.

[0279] Next, vector genomes (FIGS. 14A and 14C) and mCherry transcripts (FIGS. 14B and 14D) were measured by qPCR and qRT-PCR, respectively, 24-hours post topical administration to corneal wounded eyes. As shown in FIGS. 14A-14B, topical application to corneal wounded eyes resulted in reporter expression in the corneal epithelium in all wound types tested. Further, vector genomes (FIG. 14C) and mCherry transcripts (FIG. 14D) were detected in the whole eye (minus the corneal epithelium), albeit at lower levels compared to the corneal epithelium. Importantly, mCherry transcripts were not detected in whole blood, suggesting no vector escape into the blood at 24 hours post topical application of test article to wounded eyes (data not shown). In addition, and as shown in FIGS. 15A-15C, topical administration to corneal wounded eyes resulted in reporter expression spanning the outer corneal epithelial layer with some dissemination of reporter signal deeper into the epithelial cell layers.

[0280] Taken together, these data suggest the HSV-based vector described herein was capable of transducing corneal wounded eyes following topical application. Without wishing to be bound by theory, it is believed that these data further support the use of engineered herpes simplex viruses as novel, targeted, broadly applicable gene therapy vectors for the treatment of conditions involving corneal disease (e.g. neurotrophic keratitis).

### Example 5: In Vitro and In Vivo Analysis of a Modified Herpes Simplex Virus Encoding Human Retinal-Specific Phospholipid-Transporting ATPase (ABCA4)

[0281] ABCA4 is a membrane-bound translocase located in photoreceptor cells on the edge of rod and cone outer segment discs and to a lesser extent in retinal pigment epithelial (RPE) cells. The major substrate for ABCA4 translocase activity is N-retinylidene-phosphatidylethanolamine (N-ret-PE), a byproduct that forms in photoreceptors during light perception and whose conversion to 11-cis-retinal is essential for continuation of the visual cycle and maintenance of visual acuity. ABCA4 is therefore critical for preventing accumulation of retinal and toxic bisretinoid compounds that may form through reactions with other substrates in photoreceptors. This also avoids buildup of these toxic compounds in the retinal pigment epithelium (RPE) during the natural process of continuous phagocytosis of outer segment discs by RPE cells, where additional reactions with N-ret-PE can occur to form bisretinoids. One toxic biproduct is the metabolite pyridium bisretinoid (A2E), a precursor of lipofuscin in RPE cells that can accumulate and lead to RPE dysfunction and loss with subsequent photoreceptor death. A2E can damage cells through photooxidative processes and disruption of membranes, and thus its accumulation through loss or dysfunction of ABCA4 can have detrimental effects on retinal structure and function.

[0282] Genetic variants in the ABCA4 gene cause Stargardt disease, an autosomal recessive retinal disease with an estimated incidence of between 1 in 8,000-10,000. Stargardt is the most prevalent inherited macular dystrophy in both children and adults; onset is most common during childhood, but it can also occur into adulthood with variable prognosis. Some key diagnostic features include macular atrophy, the presence of yellow-white lipofuscin flecks at the level of the RPE, and bilateral central vision loss, which may worsen over time with disease progression as retinal function and structural integrity are lost. The age at clinical presentation, rate of progression, and prognosis are all highly variable for Stargardt disease, making it challenging to treat once diagnosed. Patients may be advised to avoid exposure to ultraviolet light and vitamin A supplementation based on studies in Abca4−/− mice suggesting that these factors accelerate retinal degeneration. Currently, there are no FDA-approved therapeutic options for Stargardt disease. Several different pharmacological interventions, including visual cycle modulators (VCMs) that prevent accumulation of toxic vitamin A dimers, are currently undergoing Phase 2 and 3 clinical trials. Because Stargardt disease is inherited in an autosomal recessive manner, clinical phenotypes are caused by ABCA4 protein insufficiencies linked to one of up to 900 genetic variants identified in this patient population; introduction of functional gene copies could therefore overcome these deficiencies and restore vision for affected individuals. Gene therapy is a promising option because retinal degeneration and subsequent vision loss is gradual in Stargardt patients, allowing time for therapeutic action. Viral vectors, such as adeno-associated viruses (AAV) and lentiviruses (LV), are limited by the genome size they can carry or the risk of carcinogenicity associated with insertional mutagenesis, respectively. Although both AAV and LV vectors have been attempted in the clinic, they have seen little success. The use of an HSV-1-based vector overcomes the limitations of genome size and presents no risk of insertional mutagenesis, making it a novel approach compared to current viral gene therapies. The use of an HSV-1-based vector platform technology capable of packaging full-length human ABCA4 and subsequently stimulating its robust expression in both photoreceptors and RPE cells upon administration to the eye would therefore represent an innovative molecular correction strategy for the treatment of Stargardt disease.

[0283] This study coupled the beneficial properties inherent to HSV-1, including its episomal lifecycle, high payload capacity, transduction efficiency, tropism for myriad human cell types, and natural immune evasiveness, with a genetic modification to render a vector platform that is both replication-defective and less cytotoxic. Accordingly, described herein is the use of a replication-defective, non-integrating HSV-1-based vector that has been engineered to deliver functional, full-length human ABCA4 (termed HSV-ABCA4) directly to relevant cell types of the patient's retina via suprachoroidal injection.

### In Vitro

[0284] The HSV-ABCA4 vector was first tested for its ability to transduce and deliver its transgene to clinically relevant primary human RPE cells (ARPE-19). ARPE-19 cells are a spontaneously arising RPE cell line derived from the normal eyes of a 19-year-old male donor (.ARPE-19 cells were transduced with HSV-ABCA4 at multiplicity of infection (MOI) of 0.05, 0.1, 0.5, 1, and 3. Cell pellets were collected 24 hours post-transduction for nucleic acid isolation. Vector genome copy number and ABCA4 transcript expression were quantified by qPCR and qRT-PCR analyses, respectively. As shown in FIG. 16, ARPE-19 cells were found to be efficiently transduced by the vector, and robust expression of the human transgene was observed.

[0285] Next, HSV-ABCA4 was tested to confirm its ability to express full-length human ABCA4 protein in ARPE-19 cells. Again, cells were transduced at an MOI of 0.05, 0.1, 0.5, 1, and 3, and cell lysates were assessed for human ABCA4 protein expression via western blot 48 hours post-transduction. Mock transduced ARPE-19 cells, used as a negative control for basal ABCA4 expression in this cell line, were below the limit of detection. Transduction of HSV-ABCA4 in ARPE-19 cells resulted in dose-dependent expression of full-length ABCA4 protein (FIG. 17).

[0286] To investigate the potential cytotoxic effects of the recombinant virus, dose-dependent toxicity of HSV-ABCA4 was evaluated by Mosmann's Tetrazolium Toxicity (MTT) assay on cultured human ARPE-19 cells 24 hours (FIG. 18A) and 48 hours (FIG. 18B) post-transduction. No significant dose-dependent effects on cell metabolism, physiology, or toxicity were observed in these clinically relevant cells, as compared to both vector control and mock treated (MOI 0) cells (set to 100% viability within each assay).

### In Vivo

[0287] Mice lacking ABCA4 (Abca4^{-/-} mice) have significantly increased levels of A2E and other lipofuscin fluorophores in the retina and RPE. Although ABCA4 is largely localized to photoreceptors, it is also present in RPE cells; mice that have been modified to only express ABCA4 in RPE cells but not in photoreceptors showed a partial rescue in photoreceptor degeneration and decreased lipofuscin buildup compared to mice with complete ABCA4 knockout. This suggests that both RPE and photoreceptor cells should be targets of molecular correction in Abca4-mediated retinal dystrophies.

[0288] The ability of HSV-ABCA4 to deliver ABCA4 protein to relevant cells in the retina was explored through vector administration to Abca4^{-/-} mice. Four-week-old Abca4−/− mice were treated via a single suprachoroidal injection to each eye with either vehicle control or HSV-ABCA4. All eyes were harvested at 24 hours post-injection to investigate ABCA4 protein levels by immunofluorescence (IF) staining. As expected, all vehicle control treated eyes were free of ABCA4 IF staining (FIG. 19A). Molecular replacement of ABCA4 was seen in the retinas of Abc4^{-/-} mice treated with HSV-ABCA4 (FIG. 19B). The ABCA4 staining pattern in HSV-ABCA4 treated Abca4^{-/-} mouse eyes mirrored that seen in wild-type rodent eyes (FIG. 19C). Colocalization of human ABCA4 and murine rhodopsin confirmed transgene delivery to clinically relevant photoreceptor cells in the retina upon suprachoroidal injection of HSV-ABCA4 (FIGS. 20A-20B).

[0289] To discern the level of vector escape from the eye after suprachoroidal administration of HSV-ABCA4, blood was collected from all animals at 24 hours post-treatment. qPCR of blood samples revealed no detectable vector in four out of five HSV-ABCA4 treated mice; one sample resulted in low-but-detectable vector genomes near the limit of quantitation of the assay (data not shown).

[0290] These in vitro and in vivo data indicate that HSV-ABCA4 capably transduced clinically relevant human retinal cells and induced deposition of full-length human ABCA4 in a dose-dependent manner without toxicity. Moreover, the vector could be effectively delivered to relevant cells in the retina via suprachoroidal administration, leading to full-length human ABCA4 expression without significant adverse effects. Taken together, these observations support the application of HSV-ABCA4 as a promising and innovative HSV-1-based therapy to fundamentally treat the molecular defect underlying Stargardt disease.

### Example 6: A Modified Herpes Simplex Virus Encoding Human Type VII Collagen for the Treatment of Recurrent Cicatrizing Conjunctivitis in a Patient with Dystrophic Epidermolysis Bullosa

[0291] Dystrophic epidermolysis bullosa (DEB) is a rare genetic blistering skin disease caused by mutations in the COL7A1 gene. It can be inherited in an autosomal dominant (DDEB) or recessive (RDEB) manner. A subset of individuals with DEB may develop ocular surface involvement, including abrasions, blistering and scarring, that can lead to impaired vision and eventual blindness. Current therapies are limited to removal of scar tissue and ophthalmic lubrication. The present study evaluated the topical use of a replication deficient herpes simplex virus type 1 vector engineered to deliver functional human type VII collagen (HSV-COL7).

[0292] A 13-year-old boy presented with DEB manifestations of ocular surface involvement and was treated on a compassionate use basis. The patient had severe ankyloblepharon reaching the central cornea in both eyes. The visual acuity was hand motion (log MAR, 3.00) in the right eye and 20/400 (log MAR, 1.30) in the left eye. Surgical symblepharon lysis with pannus removal was performed on the patient's right eye, and ophthalmic HSV-COL7 was administered three times per week for the first 2 weeks and then once weekly. After the epithelium was completely closed, HSV-COL7 applications were reduced to monthly administration.

[0293] Full healing of the corneal epithelium was observed 3 months after the surgery and regular use of topical HSV-COL7 (total of 19 cumulative doses). Eight months after surgery, slit-lamp examination showed complete epithelial healing (FIGS. 22A-22B); images obtained by optical coherence tomography (OCT) showed no evidence of corneal scarring or infiltrates, and there was no evidence of corneal abnormalities or recurrence of symblepharon (FIG. 22C). Visual acuity in the patient's right eye improved from hand motion (log MAR, 3.00) before surgery to 20/25 (log MAR, 0.10) without correction at 8 months after the surgery (FIG. 23). Ocular application of HSV-COL7 was found to be well-tolerated in this patient with no signs of ocular HSV-1-like disease, establishing preliminary safety of the vector technology when repeatedly administered to the eye.

### Example 7: A Modified Herpes Simplex Virus Encoding Human Centrosomal Protein of 290 kDa for the Treatment of Leber Congenital Amaurosis (LCA)

[0294] The following example describes the use of a recombinant herpes simplex virus type 1 (HSV-1) that successfully encodes human Centrosomal protein of 290 kDa (see e.g. SEQ ID NOs: 574 and 738) and expressed full-length human CEP290 (see e.g. SEQ ID NO: 217) protein.

[0295] A recombinant HSV-1 is engineered to incorporate a human CEP290 (see SEQ ID NO: 738) expression cassette. The recombinant HSV-1 vector contains a heterologous promoter and polyA sequence (see Example 1). Viral plaques putatively containing the human CEP290 cassette are picked and screened by infection in a complementing cell line. High expressing clones, termed HSV-CEP290, are subsequently selected for additional in vitro and/or in vivo analysis, as well as its efficacy as a treatment of one or more conditions involving the eye as described herein. These results are not available at the time of filing.

The application's sequence listing, which the Patent Office published only in electronic form, follows.

SEQUENCE LISTING (743 sequences)

SEQ ID NO: 1 - DNA, 75 bp, synthetic construct
  source 1..75: mol_type = other DNA
agggccaagaggggcagcggcgagggcaggggcagcctgctgacctgcggcgacgtggaggagaaccccggcccc

SEQ ID NO: 2 - DNA, 66 bp, synthetic construct
  source 1..66: mol_type = other DNA
ggaagcggagctactaacttcagcctgctgaagcaggctggagacgtggaggagaaccctggacct

SEQ ID NO: 3 - DNA, 69 bp, synthetic construct
  source 1..69: mol_type = other DNA
ggaagcggacagtgtactaattatgctctcttgaaattggctggagatgttgagagcaaccctggacct

SEQ ID NO: 4 - DNA, 75 bp, synthetic construct
  source 1..75: mol_type = other DNA
ggaagcggagtgaaacagactttgaattttgaccttctcaagttggcgggagacgtggagtccaaccctggacct

SEQ ID NO: 5 - protein, 25 aa, synthetic construct
RAKRGSGEGRGSLLTCGDVEENPGP

SEQ ID NO: 6 - protein, 22 aa, synthetic construct
GSGATNFSLLKQAGDVEENPGP

SEQ ID NO: 7 - protein, 23 aa, synthetic construct
GSGQCTNYALLKLAGDVESNPGP

SEQ ID NO: 8 - protein, 25 aa, synthetic construct
GSGVKQTLNFDLLKLAGDVESNPGP

SEQ ID NO: 9 - protein, 15 aa, synthetic construct
GGGGSGGGGSGGGGS

SEQ ID NO: 10 - protein, 18 aa, synthetic construct
GGSSRSSSSGGGGSGGGG

SEQ ID NO: 11 - protein, 20 aa, synthetic construct
GGGGSGGGGSGGGGSGGGGS

SEQ ID NO: 12 - protein, 15 aa, synthetic construct
CGGGSGGGGSGGGGS

SEQ ID NO: 13 - protein, 15 aa, synthetic construct
SHGGHGGGGSGGGGS

SEQ ID NO: 14 - protein, 15 aa, synthetic construct
MGGMSGGGGSGGGGS

SEQ ID NO: 15 - protein, 15 aa, synthetic construct
YGGYSGGGGSGGGGS

SEQ ID NO: 16 - protein, 15 aa, synthetic construct
WGGYSGGGGSGGGGS

SEQ ID NO: 17 - protein, 12 aa, synthetic construct
SVSVGMKPSPRP

SEQ ID NO: 18 - protein, 12 aa, synthetic construct
VISNHAGSSRRL

SEQ ID NO: 19 - protein, 12 aa, synthetic construct
PWIPTPRPTFTG

SEQ ID NO: 20 - protein, 11 aa, synthetic construct
RGRGRGRGRGR

SEQ ID NO: 21 - protein, 681 aa, Homo sapiens
MSKGILQVHPPICDCPGCRISSPVNRGRLADKRTVALPAARNLKKERTPSFSASDGDSDGSGPTCGRRPGLKQEDGPHIRIMKRRVHTHWDVNISFREASCSQDGNLPTLISSVHRSRHLVMPEHQSRCEFQRGSLEIGLRPAGDLLGKRLGRSPRISSDCFSEKRARSESPQEALLLPRELGPSMAPEDHYRRLVSALSEASTFEDPQRLYHLGLPSHGEDPPWHDPPHHLPSHDLLRVRQEVAAAALRGPSGLEAHLPSSTAGQRRKQGLAQHREGAAPAAAPSFSERELPQPPPLLSPQNAPHVALGPHLRPPFLGVPSALCQTPGYGFLPPAQAEMFAWQQELLRKQNLARLELPADLLRQKELESARPQLLAPETALRPNDGAEELQRRGALLVLNHGAAPLLALPPQGPPGSGPPTPSRDSARRAPRKGGPGPASARPSESKEMTGARLWAQDGSEDEPPKDSDGEDPETAAVGCRGPTPGQAPAGGAGAEGKGLFPGSTLPLGFPYAVSPYFHTGAVGGLSMDGEEAPAPEDVTKWTVDDVCSFVGGLSGCGEYTRVFREQGIDGETLPLLTEEHLLTNMGLKLGPALKIRAQVARRLGRVFYVASFPVALPLQPPTLRAPERELGTGEQPLSPTTATSPYGGGHALAGQTSPKQENGTLALLPGAPDPSQPLC

SEQ ID NO: 22 - protein, 1426 aa, Homo sapiens
MNDWHRIFTQNVLVPPHPQRARQPWKESTAFQCVLKWLDGPVIRQGVLEVLSEVECHLRVSFFDVTYRHFFGRTWKTTVKPTKRPPSRIVFNEPLYFHTSLNHPHIVAVVEVVAEGKKRDGSLQTLSCGFGILRIFSNQPDSPISASQDKRLRLYHGTPRALLHPLLQDPAEQNRHMTLIENCSLQYTLKPHPALEPAFHLLPENLLVSGLQQIPGLLPAHGESGDALRKPRLQKPITGHLDDLFFTLYPSLEKFEEELLELHVQDHFQEGCGPLDGGALEILERRLRVGVHNGLGFVQRPQVVVLVPEMDVALTRSASFSRKVVSSSKTSSGSQALVLRSRLRLPEMVGHPAFAVIFQLEYVFSSPAGVDGNAASVTSLSNLACMHMVRWAVWNPLLEADSGRVTLPLQGGIQPNPSHCLVYKVPSASMSSEEVKQVESGTLRFQFSLGSEEHLDAPTEPVSGPKVERRPSRKPPTSPSSPPAPVPRVLAAPQNSPVGPGLSISQLAASPRSPTQHCLARPTSQLPHGSQASPAQAQEFPLEAGISHLEADLSQTSLVLETSIAEQLQELPFTPLHAPIVVGTQTRSSAGQPSRASMVLLQSSGFPEILDANKQPAEAVSATEPVTFNPQKEESDCLQSNEMVLQFLAFSRVAQDCRGTSWPKTVYFTFQFYRFPPATTPRLQLVQLDEAGQPSSGALTHILVPVSRDGTFDAGSPGFQLRYMVGPGFLKPGERRCFARYLAVQTLQIDVWDGDSLLLIGSAAVQMKHLLRQGRPAVQASHELEVVATEYEQDNMVVSGDMLGFGRVKPIGVHSVVKGRLHLTLANVGHPCEQKVRGCSTLPPSRSRVISNDGASRFSGGSLLTTGSSRRKHVVQAQKLADVDSELAAMLLTHARQGKGPQDVSRESDATRRRKLERMRSVRLQEAGGDLGRRGTSVLAQQSVRTQHLRDLQVIAAYRERTKAESIASLLSLAITTEHTLHATLGVAEFFEFVLKNPHNTQHTVTVEIDNPELSVIVDSQEWRDFKGAAGLHTPVEEDMFHLRGSLAPQLYLRPHETAHVPFKFQSFSAGQLAMVQASPGLSNEKGMDAVSPWKSSAVPTKHAKVLFRASGGKPIAVLCLTVELQPHVVDQVFRFYHPELSFLKKAIRLPPWHTFPGAPVGMLGEDPPVHVRCSDPNVICETQNVGPGEPRDIFLKVASGPSPEIKDFFVIIYSDRWLATPTQTWQVYLHSLQRVDVSCVAGQLTRLSLVLRGTQTVRKVRAFTSHPQELKTDPKGVFVLPPRGVQDLHVGVRPLRAGSRFVHLNLVDVDCHQLVASWLVCLCCRQPLISKAFEIMLAAGEGKGVNKRITYTNPYPSRRTFHLHSDHPELLRFREDSFQVGGGETYTIGLQFAPSQRVGEEEILIYINDHEDKNEEAFCVKVIYQ

SEQ ID NO: 23 - protein, 854 aa, Homo sapiens
MALEQALQAARQGELDVLRSLHAAGLLGPSLRDPLDALPVHHAARAGKLHCLRFLVEEAALPAAARARNGATPAHDASATGHLACLQWLLSQGGCRVQDKDNSGATVLHLAARFGHPEVVNWLLHHGGGDPTAATDMGALPIHYAAAKGDFPSLRLLVEHYPEGVNAQTKNGATPLYLACQEGHLEVTQYLVQECGADPHARAHDGMTPLHAAAQMGHSPVIVWLVSCTDVSLSEQDKDGATAMHFAASRGHTKVLSWLLLHGGEISADLWGGTPLHDAAENGELECCQILVVNGAELDVRDRDGYTAADLSDFNGHSHCTRYLRTVENLSVEHRVLSRDPSAELEAKQPDSGMSSPNTTVSVQPLNFDLSSPTSTLSNYDSCSSSHSSIKGQHPPCGLSSARAADIQSYMDMLNPELGLPRGTIGKPTPPPPPPSFPPPPPPPGTQLPPPPPGYPAPKPPVGPQAADIYMQTKNKLRHVETEALKKELSSCDGHDGLRRQDSSRKPRAFSKQPSTGDYYRQLGRCPGETLAARPGMAHSEEVRARQPARAGCPRLGPAARGSLEGPSAPPQAALLPGNHVPNGCAADPKASRELPPPPPPPPPPLPEAASSPPPAPPLPLESAGPGCGQRRSSSSTGSTKSFNMMSPTGDNSELLAEIKAGKSLKPTPQSKGLTTVFSGIGQPAFQPDSPLPSVSPALSPVRSPTPPAAGFQPLLNGSLVPVPPTTPAPGVQLDVEALIPTHDEQGRPIPEWKRQVMVRKMQLKMQEEEEQRRKEEEEEARLASMPAWRRDLLRKKLEEEREQKRKEEERQKQEELRREKEQSEKLRTLGYDESKLAPWQRQVILKKGDIAKY

SEQ ID NO: 24 - protein, 279 aa, Homo sapiens
MENSEKTEVVLLACGSFNPITNMHLRLFELAKDYMNGTGRYTVVKGIISPVGDAYKKKGLIPAYHRVIMAELATKNSKWVEVDTWESLQKEWKETLKVLRHHQEKLEASDCDHQQNSPTLERPGRKRKWTETQDSSQKKSLEPKTKAVPKVKLLCGADLLESFAVPNLWKSEDITQIVANYGLICVTRAGNDAQKFIYESDVLWKHRSNIHVVNEWIANDISSTKIRRALRRGQSIRYLVPDLVQEYIEKHNLYSSESEDRNAGVILAPLQRNTAEAKT

SEQ ID NO: 25 - protein, 757 aa, Homo sapiens
MSLLFSRCNSIVTVKKNKRHMAEVNASPLKHFVTAKKKINGIFEQLGAYIQESATFLEDTYRNAELDPVTTEEQVLDVKGYLSKVRGISEVLARRHMKVAFFGRTSNGKSTVINAMLWDKVLPSGIGHTTNCFLRVEGTDGHEAFLLTEGSEEKRSAKTVNQLAHALHQDKQLHAGSLVSVMWPNSKCPLLKDDLVLMDSPGIDVTTELDSWIDKFCLDADVFVLVANSESTLMQTEKHFFHKVSERLSRPNIFILNNRWDASASEPEYMEEVRRQHMERCTSFLVDELGVVDRSQAGDRIFFVSAKEVLNARIQKAQGMPEGGGALAEGFQVRMFEFQNFERRFEECISQSAVKTKFEQHTVRAKQIAEAVRLIMDSLHMAAREQQVYCEEMREERQDRLKFIDKQLELLAQDYKLRIKQITEEVERQVSTAMAEEIRRLSVLVDDYQMDFHPSPVVLKVYKNELHRHIEEGLGRNMSDRCSTAITNSLQTMQQDMIDGLKPLLPVSVRSQIDMLVPRQCFSLNYDLNCDKLCADFQEDIEFHFSLGWTMLVNRFLGPKNSRRALMGYNDQVQRPIPLTPANPSMPPLPQGSLTQEEFMVSMVTGLASLTSRTSMGILVVGGVVWKAVGWRLIALSFGLYGLLYVYERLTWTTKAKERAFKRQFVEHASEKLQLVISYTGSNCSHQVQQELSGTFAHLCQQVDVTRENLEQEIAAMNKKIEVLDSLQSKAKLLRNKAGWLDSELNMFTHQYLQPSR

SEQ ID NO: 26 - protein, 993 aa, Homo sapiens
MAAEWASRFWLWATLLIPAAAVYEDQVGKFDWRQQYVGKVKFASLEFSPGSKKLVVATEKNVIAALNSRTGEILWRHVDKGTAEGAVDAMLLHGQDVITVSNGGRIMRSWETNIGGLNWEITLDSGSFQALGLVGLQESVRYIAVLKKTTLALHHLSSGHLKWVEHLPESDSIHYQMVYSYGSGVVWALGVVPFSHVNIVKFNVEDGEIVQQVRVSTPWLQHLSGACGVVDEAVLVCPDPSSRSLQTLALETEWELRQIPLQSLDLEFGSGFQPRVLPTQPNPVDASRAQFFLHLSPSHYALLQYHYGTLSLLKNFPQTALVSFATTGEKTVAAVMACRNEVQKSSSSEDGSMGSFSEKSSSKDSLACFNQTYTINLYLVETGRRLLDTTITFSLEQSGTRPERLYIQVFLKKDDSVGYRALVQTEDHLLLFLQQLAGKVVLWSREESLAEVVCLEMVDLPLTGAQAELEGEFGKKADGLLGMFLKRLSSQLILLQAWTSHLWKMFYDARKPRSQIKNEINIDTLARDEFNLQKMMVMVTASGKLFGIESSSGTILWKQYLPNVKPDSSFKLMVQRTTAHFPHPPQCTLLVKDKESGMSSLYVFNPIFGKWSQVAPPVLKRPILQSLLLPVMDQDYAKVLLLIDDEYKVTAFPATRNVLRQLHELAPSIFFYLVDAEQGRLCGYRLRKDLTTELSWELTIPPEVQRIVKVKGKRSSEHVHSQGRVMGDRSVLYKSLNPNLLAVVTESTDAHHERTFIGIFLIDGVTGRIIHSSVQKKAKGPVHIVHSENWVVYQYWNTKARRNEFTVLELYEGTEQYNATAFSSLDRPQLPQVLQQSYIFPSSISAMEATITERGITSRHLLIGLPSGAILSLPKALLDPRRPEIPTEQSREENLIPYSPDVQIHAERFINYNQTVSRMRGIYTAPSGLESTCLVVAYGLDIYQTRVYPSKQFDVLKDDYDYVLISSVLFGLVFATMITKRLAQVKLLNRAWR

SEQ ID NO: 27 - protein, 138 aa, Homo sapiens
MKGLLPLAWFLACSVPAVQGGLLDLKSMIEKVTGKNALTNYGFYGCYCGWGGRGTPKDGTDWCCWAHDHCYGRLEEKGCNIRTQSYKYRFAWGVVTCEPGPFCHVNLCACDRKLVYCLKRNLRSYNPQYQYFPNILCS

SEQ ID NO: 28 - protein, 333 aa, Homo sapiens
MSWIKEGELSLWERFCANIIKAGPMPKHIAFIMDGNRRYAKKCQVERQEGHSQGFNKLAETLRWCLNLGILEVTVYAFSIENFKRSKSEVDGLMDLARQKFSRLMEEKEKLQKHGVCIRVLGDLHLLPLDLQELIAQAVQATKNYNKCFLNVCFAYTSRHEISNAVREMAWGVEQGLLDPSDISESLLDKCLYTNRSPHPDILIRTSGEVRLSDFLLWQTSHSCLVFQPVLWPEYTFWNLFEAILQFQMNHSVLQKARDMYAEERKRQQLERDQATVTEQLLREGLQASGDAQLRRTRLHKLSARREERVQGFLQALELKRADWLARLGTASA

SEQ ID NO: 29 - protein, 306 aa, Homo sapiens
MASPGCLWLLAVALLPWTCASRALQHLDPPAPLPLVIWHGMGDSCCNPLSMGAIKKMVEKKIPGIYVLSLEIGKTLMEDVENSFFLNVNSQVTTVCQALAKDPKLQQGYNAMGFSQGGQFLRAVAQRCPSPPMINLISVGGQHQGVFGLPRCPGESSHICDFIRKTLNAGAYSKVVQERLVQAEYWHDPIKEDVYRNHSIFLADINQERGINESYKKNLMALKKFVMVKFLNDSIVDPVDSEWFGFYRSGQAKETIPLQETSLYTQDRLGLKEMDNAGQLVFLATEGDHLQLSEEWFYAHIIPFLG

SEQ ID NO: 30 - protein, 279 aa, Homo sapiens
MEAVVNLYQEVMKHADPRIQGYPLMGSPLLMTSILLTYVYFVLSLGPRIMANRKPFQLRGFMIVYNFSLVALSLYIVYEFLMSGWLSTYTWRCDPVDYSNSPEALRMVRVAWLFLFSKFIELMDTVIFILRKKDGQVTFLHVFHHSVLPWSWWWGVKIAPGGMGSFHAMINSSVHVIMYLYYGLSAFGPVAQPYLWWKKHMTAIQLIQFVLVSLHISQYYFMSSCNYQYPVIIHLIWMYGTIFFMLFSNFWYHSYTKGKRLPRALQQNGAPGIAKVKAN

SEQ ID NO: 31 - protein, 660 aa, Homo sapiens
MDDWKPSPLIKPFGARKKRSWYLTWKYKLTNQRALRRFCQTGAVLFLLVTVIVNIKLILDTRRAISEANEDPEPEQDYDEALGRLEPPRRRGSGPRRVLDVEVYSSRSKVYVAVDGTTVLEDEAREQGRGIHVIVLNQATGHVMAKRVFDTYSPHEDEAMVLFLNMVAPGRVLICTVKDEGSFHLKDTAKALLRSLGSQAGPALGWRDTWAFVGRKGGPVFGEKHSKSPALSSWGDPVLLKTDVPLSSAEEAECHWADTELNRRRRRFCSKVEGYGSVCSCKDPTPIEFSPDPLPDNKVLNVPVAVIAGNRPNYLYRMLRSLLSAQGVSPQMITVFIDGYYEEPMDVVALFGLRGIQHTPISIKNARVSQHYKASLTATFNLFPEAKFAVVLEEDLDIAVDFFSFLSQSIHLLEEDDSLYCISAWNDQGYEHTAEDPALLYRVETMPGLGWVLRRSLYKEELEPKWPTPEKLWDWDMWMRMPEQRRGRECIIPDVSRSYHFGIVGLNMNGYFHEAYFKKHKFNTVPGVQLRNVDSLKKEAYEVEVHRLLSEAEVLDHSKNPCEDSFLPDTEGHTYVAFIRMEKDDDFTTWTQLAKCLHIWDLDVRGNHRGLWRLFRKKNHFLMVGVPASPYSVKKPPSVTPIFLEPPPKEEGAPGAPEQT

SEQ ID NO: 32 - protein, 533 aa, Homo sapiens
MSIQVEHPAGGYKKLFETVEELSSPLTAHVTGRIPLWLTGSLLRCGPGLFEVGSEPFYHLFDGQALLHKFDFKEGHVTYHRRFIRTDAYVRAMTEKRIVITEFGTCAFPDPCKNIFSRFFSYFRGVEVTDNALVNVYPVGEDYYACTETNFITKINPETLETIKQVDLCNYVSVNGATAHPHIENDGTVYNIGNCFGKNFSIAYNIVKIPPLQADKEDPISKSEIVVQFPCSDRFKPSYVHSFGLTPNYIVFVETPVKINLFKFLSSWSLWGANYMDCFESNETMGVWLHIADKKRKKYLNNKYRTSPFNLFHHINTYEDNGFLIVDLCCWKGFEFVYNYLYLANLRENWEEVKKNARKAPQPEVRRYVLPLNIDKADTGKNLVTLPNTTATAILCSDETIWLEPEVLFSGPRQAFEFPQINYQKYCGKPYTYAYGLGLNHFVPDRLCKLNVKTKETWVWQEPDSYPSEPIFVSHPDALEEDDGVVLSVVVSPGAGQKPAYLLILNAKDLSEVARAEVEINIPVTFHGLFKKS

SEQ ID NO: 33 - protein, 2273 aa, Homo sapiens [sequence omitted]

SEQ ID NO: 34 - protein, 1806 aa, Homo sapiens
MEPWSSRWKTKRWLWDFTVTTLALTFLFQAREVRGAAPVDVLKALDFHNSPEGISKTTGFCTNRKNSKGSDTAYRVSKQAQLSAPTKQLFPGGTFPEDFSILFTVKPKKGIQSFLLSIYNEHGIQQIGVEVGRSPVFLFEDHTGKPAPEDYPLFRTVNIADGKWHRVAISVEKKTVTMIVDCKKKTTKPLDRSERAIVDTNGITVFGTRILDEEVFEGDIQQFLITGDPKAAYDYCEHYSPDCDSSAPKAAQAQEPQIDEYAPEDIIEYDYEYGEAEYKEAESVTEGPTVTEETIAQTEANIVDDFQEYNYGTMESYQTEAPRHVSGTNEPNPVEEIFTEEYLTGEDYDSQRKNSEDTLYENKEIDGRDSDLLVDGDLGEYDFYEYKEYEDKPTSPPNEEFGPGVPAETDITETSINGHGAYGEKGQKGEPAVVEPGMLVEGPPGPAGPAGIMGPPGLQGPTGPPGDPGDRGPPGRPGLPGADGLPGPPGTMLMLPFRYGGDGSKGPTISAQEAQAQAILQQARIALRGPPGPMGLTGRPGPVGGPGSSGAKGESGDPGPQGPRGVQGPPGPTGKPGKRGRPGADGGRGMPGEPGAKGDRGFDGLPGLPGDKGHRGERGPQGPPGPPGDDGMRGEDGEIGPRGLPGEAGPRGLLGPRGTPGAPGQPGMAGVDGPPGPKGNMGPQGEPGPPGQQGNPGPQGLPGPQGPIGPPGEKGPQGKPGLAGLPGADGPPGHPGKEGQSGEKGALGPPGPQGPIGYPGPRGVKGADGVRGLKGSKGEKGEDGFPGFKGDMGLKGDRGEVGQIGPRGEDGPEGPKGRAGPTGDPGPSGQAGEKGKLGVPGLPGYPGRQGPKGSTGFPGFPGANGEKGARGVAGKPGPRGQRGPTGPRGSRGARGPTGKPGPKGTSGGDGPPGPPGERGPQGPQGPVGFPGPKGPPGPPGKDGLPGHPGQRGETGFQGKTGPPGPGGVVGPQGPTGETGPIGERGHPGPPGPPGEQGLPGAAGKEGAKGDPGPQGISGKDGPAGLRGFPGERGLPGAQGAPGLKGGEGPQGPPGPVGSPGERGSAGTAGPIGLPGRPGPQGPPGPAGEKGAPGEKGPQGPAGRDGVQGPVGLPGPAGPAGSPGEDGDKGEIGEPGQKGSKGDKGENGPPGPPGLQGPVGAPGIAGGDGEPGPRGQQGMFGQKGDEGARGFPGPPGPIGLQGLPGPPGEKGENGDVGPMGPPGPPGPRGPQGPNGADGPQGPPGSVGSVGGVGEKGEPGEAGNPGPPGEAGVGGPKGERGEKGEAGPPGAAGPPGAKGPPGDDGPKGNPGPVGFPGDPGPPGEPGPAGQDGVGGDKGEDGDPGQPGPPGPSGEAGPPGPPGKRGPPGAAGAEGRQGEKGAKGEAGAEGPPGKTGPVGPQGPAGKPGPEGLRGIPGPVGEQGLPGAAGQDGPPGPMGPPGLPGLKGDPGSKGEKGHPGLIGLIGPPGEQGEKGDRGLPGTQGSPGAKGDGGIPGPAGPLGPPGPPGLPGPQGPKGNKGSTGPAGQKGDSGLPGPPGSPGPPGEVIQPLPILSSKKTRRHTEGMQADADDNILDYSDGMEEIFGSLNSLKQDIEHMKFPMGTQTNPARTCKDLQLSHPDFPDGEYWIDPNQGCSGDSFKVYCNFTSGGETCIYPDKKSEGVRISSWPKEKPGSWFSEFKRGKLLSYLDVEGNSINMVQMTFLKLLTASARQNFTYHCHQSAAWYDVSSGSYDKALRFLGSNDEEMSYDNNPFIKTLYDGCASRKGYEKTVIEINTPKIDQVPIVDVMINDFGDQNQKFGFEVGPVCFLG

SEQ ID NO: 35 - protein, 354 aa, Homo sapiens
MGSGASAEDKELAKRSKELEKKLQEDADKEAKTVKLLLLGAGESGKSTIVKQMKIIHQDGYSPEECLEFKAIIYGNVLQSILAIIRAMTTLGIDYAEPSCADDGRQLNNLADSIEEGTMPPELVEVIRRLWKDGGVQACFERAAEYQLNDSASYYLNQLERITDPEYLPSEQDVLRSRVKTTGIIETKFSVKDLNFRMFDVGGQRSERKKWIHCFEGVTCIIFCAALSAYDMVLVEDDEVNRMHESLHLFNSICNHKFFAATSIVLFLNKKDLFEEKIKKVHLSICFPEYDGNNSYDDAGNYIKSQFLDLNMRKDVKEIYSHMTCATDTQNVKFVFDAVTDIIIKENLKDCGLF

SEQ ID NO: 36 - protein, 551 aa, Homo sapiens
MLCSLLLCECLLLVAGYAHDDDWIDPTDMLNYDAASGTMRKSQAKYGISGEKDVSPDLSCADEISECYHKLDSLTYKIDECEKKKREDYESQSNPVFRRYLNKILIEAGKLGLPDENKGDMHYDAEIILKRETLLEIQKFLNGEDWKPGALDDALSDILINFKFHDFETWKWRFEDSFGVDPYNVLMVLLCLLCIVVLVATELWTYVRWYTQLRRVLIISFLFSLGWNWMYLYKLAFAQHQAEVAKMEPLNNVCAKKMDWTGSIWEWFRSSWTYKDDPCQKYYELLLVNPIWLVPPTKALAVTFTTFVTEPLKHIGKGTGEFIKALMKEIPALLHLPVLIIMALAILSFCYGAGKSVHVLRHIGGPESEPPQALRPRDRRRQEEIDYRPDGGAGDADFHYRGQMGPTEQGPYAKTYEGRREILRERDVDLRFQTGNKSPEVLRAFDVPDAEAREHPTVVPSHKSPVLDTKPKETGGILGEGTPKESSTESSQSAKPVSGQDTSGNTEGSPAAEKAQLKSEAAGSPDQGSTYSPARGVAGPRGQDPVSSPCG

SEQ ID NO: 37 - protein, 266 aa, Homo sapiens
MWWFQQGLSFLPSALVIWTSAAFIFSYITAVTLHHIDPALPYISDTGTVAPEKCLFGAMLNIAAVLCIATIYVRYKQVHALSPEENVIIKLNKAGLVLGILSCLGLSIVANFQKTTLFAAHVSGAVLTFGMGSLYMFVQTILSYQMQPKIHGKQVFWIRLLLVIWCGVSALSMLTCSSVLHSGNFGTDLEQKLHWNPEDKGYVLHMITTAAEWSMSFSFFGFFLTYIRDFQKISLRVEANLHGLTLYDTAPCPINNERTRLLSRDI

SEQ ID NO: 38 - protein, 683 aa, Homo sapiens
MALSKRELDELKPWIEKTVKRVLGFSEPTVVTAALNCVGKGMDKKKAADHLKPFLDDSTLRFVDKLFEAVEEGRSSRHSKSSSDRSRKRELKEVFGDDSEISKESSGVKKRRIPRFEEVEEEPEVIPGPPSESPGMLTKLQIKQMMEAATRQIEERKKQLSFISPPTPQPKTPSSSQPERLPIGNTIQPSQAATFMNDAIEKARKAAELQARIQAQLALKPGLIGNANMVGLANLHAMGIAPPKVELKDQTKPTPLILDEQGRTVDATGKEIELTHRMPTLKANIRAVKREQFKQQLKEKPSEDMESNTFFDPRVSIAPSQRQRRTFKFHDKGKFEKIAQRLRTKAQLEKLQAEISQAARKTGIHTSTRLALIAPKKELKEGDIPEIEWWDSYIIPNGFDLTEENPKREDYFGITNLVEHPAQLNPPVDNDTPVTLGVYLTKKEQKKLRRQTRREAQKELQEKVRLGLMPPPEPKVRISNLMRVLGTEAVQDPTKVEAHVRAQMAKRQKAHEEANAARKLTAEQRKVKKIKKLKEDISQGVHISVYRVRNLSNPAKKFKIEANAGQLYLTGVVVLHKDVNVVVVEGGPKAQKKFKRLMLHRIKWDEQTSNTKGDDDEESDEEAVKKTNKCVLVWEGTAKDRSFGEMKFKQCPTENMAREHFKKHGAEHYWDLALSESVLESTD

SEQ ID NO: 39 - protein, 121 aa, Homo sapiens
MSQKQEEENPAEETGEEKQDTQEKEGILPERAEEAKLKAKYPSLGQKPGGSDFLMKRLQKGQKYFDSGDYNMAKAKMKNKQLPSAGPDKNLVTGDHIPTPQDLPQRKSSLVTSKLAGGQVE

SEQ ID NO: 40 - protein, 761 aa, Homo sapiens
MALPALGLDPWSLLGLFLFQLLQLLLPTTTAGGGGQGPMPRVRYYAGDERRALSFFHQKGLQDFDTLLLSGDGNTLYVGAREAILALDIQDPGVPRLKNMIPWPASDRKKSECAFKKKSNETQCFNFIRVLVSYNVTHLYTCGTFAFSPACTFIELQDSYLLPISEDKVMEGKGQSPFDPAHKHTAVLVDGMLYSGTMNNFLGSEPILMRTLGSQPVLKTDNFLRWLHHDASFVAAIPSTQVVYFFFEETASEFDFFERLHTSRVARVCKNDVGGEKLLQKKWTTFLKAQLLCTQPGQLPFNVIRHAVLLPADSPTAPHIYAVFTSQWQVGGTRSSAVCAFSLLDIERVFKGKYKELNKETSRWTTYRGPETNPRPGSCSVGPSSDKALTFMKDHFLMDEQVVGTPLLVKSGVEYTRLAVETAQGLDGHSHLVMYLGTTTGSLHKAVVSGDSSAHLVEEIQLFPDPEPVRNLQLAPTQGAVFVGFSGGVWRVPRANCSVYESCVDCVLARDPHCAWDPESRTCCLLSAPNLNSWKQDMERGNPEWACASGPMSRSLRPQSRPQIIKEVLAVPNSILELPCPHLSALASYYWSHGPAAVPEASSTVYNGSLLLIVQDGVGGLYQCWATENGFSYPVISYWVDSQDQTLALDPELAGIPREHVKVPLTRVSGGAALAAQQSYWPHFVTVTVLFALVLSGALIILVASPLRALRARGKVQGCETLRPGEKAPLSREQHLQSPKECRTSASDVDADNNCLGTEVA

SEQ ID NO: 41 - protein, 670 aa, Homo sapiens
MGEPAGVAGTMESPFSPGLFHRLDEDWDSALFAELGYFTDTDELQLEAANETYENNFDNLDFDLDLMPWESDIWDINNQICTVKDIKAEPQPLSPASSSYSVSSPRSVDSYSSTQHVPEELDLSSSSQMSPLSLYGENSNSLSSAEPLKEDKPVTGPRNKTENGLTPKKKIQVNSKPSIQPKPLLLPAAPKTQTNSSVPAKTIIIQTVPTLMPLAKQQPIISLQPAPTKGQTVLLSQPTVVQLQAPGVLPSAQPVLAVAGGVTQLPNHVVNVVPAPSANSPVNGKLSVTKPVLQSTMRNVGSDIAVLRRQQRMIKNRESACQSRKKKKEYMLGLEARLKAALSENEQLKKENGTLKRQLDEVVSENQRLKVPSPKRRVVCVMIVLAFIILNYGPMSMLEQDSRRMNPSVSPANQRRHLLGFSAKEAQDTSDGIIQKNSYRYDHSVSNDKALMVLTEEPLLYIPPPPCQPLINTTESLRLNHELRGWVHRHEVERTKSRRMTNNQQKTRILQGALEQGSNSQLMAVQYTETTSSISRNSGSELQVYYASPRSYQDFFEAIRRRGDTFYVVSFRRDHLLLPATTHNKTTRPKMSIVLPAININENVINGQDYEVMMQIDCQVMDTRILHIKSSSVPPYLRDQQRNQTNTFFGSPPAATEATHVVSTIPESLQ

SEQ ID NO: 42 - protein, 5635 aa, Homo sapiens
MISWEVVHTVFLFALLYSSLAQDASPQSEIRAEEIPEGASTLAFVFDVTGSMYDDLVQVIEGASKILETSLKRPKRPLFNFALVPFHDPEIGPVTITTDPKKFQYELRELYVQGGGDCPEMSIGAIKIALEISLPGSFIYVFTDARSKDYRLTHEVLQLIQQKQSQVVFVLTGDCDDRTHIGYKVYEEIASTSSGQVFHLDKKQVNEVLKWVEEAVQASKVHLLSTDHLEQAVNTWRIPFDPSLKEVTVSLSGPSPMIEIRNPLGKLIKKGFGLHELLNIHNSAKVVNVKEPEAGMWTVKTSSSGRHSVRITGLSTIDFRAGFSRKPTLDFKKTVSRPVQGIPTYVLLNTSGISTPARIDLLELLSISGSSLKTIPVKYYPHRKPYGIWNISDFVPPNEAFFLKVTGYDKDDYLFQRVSSVSFSSIVPDAPKVTMPEKTPGYYLQPGQIPCSVDSLLPFTLSFVRNGVTLGVDQYLKESASVNLDIAKVTLSDEGFYECIAVSSAGTGRAQTFFDVSEPPPVIQVPNNVTVTPGERAVLTCLIISAVDYNLTWQRNDRDVRLAEPARIRTLANLSLELKSVKFNDAGEYHCMVSSEGGSSAASVFLTVQEPPKVTVMPKNQSFTGGSEVSIMCSATGYPKPKIAWTVNDMFIVGSHRYRMTSDGTLFIKNAAPKDAGIYGCLASNSAGTDKQNSTLRYIEAPKLMVVQSELLVALGDITVMECKTSGIPPPQVKWFKGDLELRPSTFLIIDPLLGLLKIQETQDLDAGDYTCVAINEAGRATGKITLDVGSPPVFIQEPADVSMEIGSNVTLPCYVQGYPEPTIKWRRLDNMPIFSRPFSVSSISQLRTGALFILNLWASDKGTYICEAENQFGKIQSETTVTVTGLVAPLIGISPSVANVIEGQQLTLPCTLLAGNPIPERRWIKNSAMLLQNPYITVRSDGSLHIERVQLQDGGEYTCVASNVAGTNNKTTSVVVHVLPTIQHGQQILSTIEGIPVTLPCKASGNPKPSVIWSKKGELISTSSAKFSAGADGSLYVVSPGGEESGEYVCTATNTAGYAKRKVQLTVYVRPRVFGDQRGLSQDKPVEISVLAGEEVTLPCEVKSLPPPIITWAKETQLISPFSPRHTFLPSGSMKITETRTSDSGMYLCVATNIAGNVTQAVKLNVHVPPKIQRGPKHLKVQVGQRVDIPCNAQGTPLPVITWSKGGSTMLVDGEHHVSNPDGTLSIDQATPSDAGIYTCVATNIAGTDETEITLHVQEPPTVEDLEPPYNTTFQERVANQRIEFPCPAKGTPKPTIKWLHNGRELTGREPGISILEDGTLLVIASVTPYDNGEYICVAVNEAGTTERKYNLKVHVPPVIKDKEQVTNVSVLLNQLTNLFCEVEGTPSPIIMWYKDNVQVTESSTIQTVNNGKILKLFRATPEDAGRYSCKAINIAGTSQKYFNIDVLVPPTIIGTNFPNEVSVVLNRDVALECQVKGTPFPDIHWFKDGKPLFLGDPNVELLDRGQVLHLKNARRNDKGRYQCTVSNAAGKQAKDIKLTIYIPPSIKGGNVTTDISVLINSLIKLECETRGLPMPAITWYKDGQPIMSSSQALYIDKGQYLHIPRAQVSDSATYTCHVANVAGTAEKSFHVDVYVPPMIEGNLATPLNKQVVIAHSLTLECKAAGNPSPILTWLKDGVPVKANDNIRIEAGGKKLEIMSAQEIDRGQYICVATSVAGEKEIKYEVDVLVPPAIEGGDETSYFIVMVNNLLELDCHVTGSPPPTIMWLKDGQLIDERDGFKILLNGRKLVIAQAQVSNTGLYRCMAANTAGDHKKEFEVTVHVPPTIKSSGLSERVVVKYKPVALQCIANGIPNPSITWLKDDQPVNTAQGNLKIQSSGRVLQIAKTLLEDAGRYTCVATNAAGETQQHIQLHVHEPPSLEDAGKMLNETVLVSNPVQLECKAAGNPVPVITWYKDNRLLSGSTSMTFLNRGQIIDIESAQISDAGIYKCVAINSAGATELFYSLQVHVAPSISGSNNMVAVVVNNPVRLECEARGIPAPSLTWLKDGSPVSSFSNGLQVLSGGRILALTSAQISDTGRYTCVAVNAAGEKQRDIDLRVYVPPNIMGEEQNVSVLISQAVELLCQSDAIPPPTLTWLKDGHPLLKKPGLSISENRSVLKIEDAQVQDTGRYTCEATNVAGKTEKNYNVNIWVPPNIGGSDELTQLTVIEGNLISLLCESSGIPPPNLIWKKKGSPVLTDSMGRVRILSGGRQLQISIAEKSDAALYSCVASNVAGTAKKEYNLQVYIRPTITNSGSHPTEIIVTRGKSISLECEVQGIPPPTVTWMKDGHPLIKAKGVEILDEGHILQLKNIHVSDTGRYVCVAVNVAGMTDKKYDLSVHAPPSIIGNHRSPENISVVEKNSVSLTCEASGIPLPSITWFKDGWPVSLSNSVRILSGGRMLRLMQTTMEDAGQYTCVVRNAAGEERKIFGLSVLVPPHIVGENTLEDVKVKEKQSVTLTCEVTGNPVPEITWHKDGQPLQEDEAHHIISGGRFLQITNVQVPHTGRYTCLASSPAGHKSRSFSLNVFVSPTIAGVGSDGNPEDVTVILNSPTSLVCEAYSYPPATITWFKDGTPLESNRNIRILPGGRTLQILNAQEDNAGRYSCVATNEAGEMIKHYEVKVYIPPIINKGDLWGPGLSPKEVKIKVNNTLTLECEAYAIPSASLSWYKDGQPLKSDDHVNIAANGHTLQIKEAQISDTGRYTCVASNIAGEDELDFDVNIQVPPSFQKLWEIGNMLDTGRNGEAKDVIINNPISLYCETNAAPPPTLTWYKDGHPLTSSDKVLILPGGRVLQIPRAKVEDAGRYTCVAVNEAGEDSLQYDVRVLVPPIIKGANSDLPEEVTVLVNKSALIECLSSGSPAPRNSWQKDGQPLLEDDHHKFLSNGRILQILNTQITDIGRYVCVAENTAGSAKKYFNLNVHVPPSVIGPKSENLTVVVNNFISLTCEVSGFPPPDLSWLKNEQPIKLNTNTLIVPGGRTLQIIRAKVSDGGEYTCIAINQAGESKKKFSLTVYVPPSIKDHDSESLSVVNVREGTSVSLECESNAVPPPVITWYKNGRMITESTHVEILADGQMLHIKKAEVSDTGQYVCRAINVAGRDDKNFHLNVYVPPSIEGPEREVIVETISNPVTLTCDATGIPPPTIAWLKNHKRIENSDSLEVRILSGGSKLQIARSQHSDSGNYTCIASNMEGKAQKYYFLSIQVPPSVAGAEIPSDVSVLLGENVELVCNANGIPTPLIQWLKDGKPIASGETERIRVSANGSTLNIYGALTSDTGKYTCVATNPAGEEDRIFNLNVYVTPTIRGNKDEAEKLMTLVDTSINIECRATGTPPPQINWLKNGLPLPLSSHIRLLAAGQVIRIVRAQVSDVAVYTCVASNRAGVDNKHYNLQVFAPPNMDNSMGTEEITVLKGSSTSMACITDGTPAPSMAWLRDGQPLGLDAHLTVSTHGMVLQLLKAETEDSGKYTCIASNEAGEVSKHFILKVLEPPHINGSEEHEEISVIVNNPLELTCIASGIPAPKMTWMKDGRPLPQTDQVQTLGGGEVLRISTAQVEDTGRYTCLASSPAGDDDKEYLVRVHVPPNIAGTDEPRDITVLRNRQVTLECKSDAVPPPVITWLRNGERLQATPRVRILSGGRYLQINNADLGDTANYTCVASNIAGKTTREFILTVNVPPNIKGGPQSLVILLNKSTVLECIAEGVPTPRITWRKDGAVLAGNHARYSILENGFLHIQSAHVTDTGRYLCMATNAAGTDRRRIDLQVHVPPSIAPGPTNMTVIVNVQTTLACEATGIPKPSINWRKNGHLLNVDQNQNSYRLLSSGSLVIISPSVDDTATYECTVTNGAGDDKRTVDLTVQVPPSIADEPTDFLVTKHAPAVITCTASGVPFPSIHWTKNGIRLLPRGDGYRILSSGAIEILATQLNHAGRYTCVARNAAGSAHRHVTLHVHEPPVIQPQPSELHVILNNPILLPCEATGTPSPFITWQKEGINVNTSGRNHAVLPSGGLQISRAVREDAGTYMCVAQNPAGTALGKIKLNVQVPPVISPHLKEYVIAVDKPITLSCEADGLPPPDITWHKDGRAIVESIRQRVLSSGSLQIAFVQPGDAGHYTCMAANVAGSSSTSTKLTVHVPPRIRSTEGHYTVNENSQAILPCVADGIPTPAINWKKDNVLLANLLGKYTAEPYGELILENVVLEDSGFYTCVANNAAGEDTHTVSLTVHVLPTFTELPGDVSLNKGEQLRLSCKATGIPLPKLTWTFNNNIIPAHFDSVNGHSELVIERVSKEDSGTYVCTAENSVGFVKAIGFVYVKEPPVFKGDYPSNWIEPLGGNAILNCEVKGDPTPTIQWNRKGVDIEISHRIRQLGNGSLAIYGTVNEDAGDYTCVATNEAGVVERSMSLTLQSPPIITLEPVETVINAGGKIILNCQATGEPQPTITWSRQGHSISWDDRVNVLSNNSLYIADAQKEDTSEFECVARNLMGSVLVRVPVIVQVHGGFSQWSAWRACSVTCGKGIQKRSRLCNQPLPANGGKPCQGSDLEMRNCQNKPCPVDGSWSEWSLWEECTRSCGRGNQTRTRTCNNPSVQHGGRPCEGNAVEIIMCNIRPCPVHGAWSAWQPWGTCSESCGKGTQTRARLCNNPPPAFGGSYCDGAETQMQVCNERNCPIHGKWATWASWSACSVSCGGGARQRTRGCSDPVPQYGGRKCEGSDVQSDFCNSDPCPTHGNWSPWSGWGTCSRTCNGGQMRRYRTCDNPPPSNGGRACGGPDSQIQRCNTDMCPVDGSWGSWHSWSQCSASCGGGEKTRKRLCDHPVPVKGGRPCPGDTTQVTRCNVQACPGGPQRARGSVIGNINDVEFGIAFLNATITDSPNSDTRIIRAKITNVPRSLGSAMRKIVSILNPIYWTTAKEIGEAVNGFTLTNAVFKRETQVEFATGEILQMSHIARGLDSDGSLLLDIVVSGYVLQLQSPAEVTVKDYTEDYIQTGPGQLYAYSTRLFTIDGISIPYTWNHTVFYDQAQGRMPFLVETLHASSVESDYNQIEETLGFKIHASISKGDRSNQCPSGFTLDSVGPFCADEDECAAGNPCSHSCHNAMGTYYCSCPKGLTIAADGRTCQDIDECALGRHTCHAGQDCDNTIGSYRCVVRCGSGFRRTSDGLSCQDINECQESSPCHQRCFNAIGSFHCGCEPGYQLKGRKCMDVNECRQNVCRPDQHCKNTRGGYKCIDLCPNGMTKAENGTCIDIDECKDGTHQCRYNQICENTRGSYRCVCPRGYRSQGVGRPCMDINECEQVPKPCAHQCSNTPGSFKCICPPGQHLLGDGKSCAGLERLPNYGTQYSSYNLARFSPVRNNYQPQQHYRQYSHLYSSYSEYRNSRTSLSRTRRTIRKTCPEGSEASHDTCVDIDECENTDACQHECKNTFGSYQCICPPGYQLTHNGKTCQDIDECLEQNVHCGPNRMCFNMRGSYQCIDTPCPPNYQRDPVSGFCLKNCPPNDLECALSPYALEYKLVSLPFGIATNQDLIRLVAYTQDGVMHPRTTFLMVDEEQTVPFALRDENLKGVVYTTRPLREAETYRMRVRASSYSANGTIEYQTTFIVYIAVSAYPY

SEQ ID NO: 43 - protein, 1231 aa, Homo sapiens
MRLLAKIICLMLWAICVAEDCNELPPRRNTEILTGSWSDQTYPEGTQAIYKCRPGYRSLGNVIMVCRKGEWVALNPLRKCQKRPCGHPGDTPFGTFTLTGGNVFEYGVKAVYTCNEGYQLLGEINYRECDTDGWTNDIPICEVVKCLPVTAPENGKIVSSAMEPDREYHFGQAVRFVCNSGYKIEGDEEMHCSDDGFWSKEKPKCVEISCKSPDVINGSPISQKIIYKENERFQYKCNMGYEYSERGDAVCTESGWRPLPSCEEKSCDNPYIPNGDYSPLRIKHRTGDEITYQCRNGFYPATRGNTAKCTSTGWIPAPRCTLKPCDYPDIKHGGLYHENMRRPYFPVAVGKYYSYYCDEHFETPSGSYWDHIHCTQDGWSPAVPCLRKCYFPYLENGYNQNYGRKFVQGKSIDVACHPGYALPKAQTTVTCMENGWSPTPRCIRVKTCSKSSIDIENGFISESQYTYALKEKAKYQCKLGYVTADGETSGSITCGKDGWSAQPTCIKSCDIPVFMNARTKNDFTWFKLNDTLDYECHDGYESNTGSTTGSIVCGYNGWSDLPICYERECELPKIDVHLVPDRKKDQYKVGEVLKFSCKPGFTIVGPNSVQCYHFGLSPDLPICKEQVQSCGPPPELLNGNVKEKTKEEYGHSEVVEYYCNPRFLMKGPNKIQCVDGEWTTLPVCIVEESTCGDIPELEHGWAQLSSPPYYYGDSVEFNCSESFTMIGHRSITCIHGVWTQLPQCVAIDKLKKCKSSNLIILEEHLKNKKEFDHNSNIRYRCRGKEGWIHTVCINGRWDPEVNCSMAQIQLCPPPPQIPNSHNMTTTLNYRDGEKVSVLCQENYLIQEGEEITCKDGRWQSIPLCVEKIPCSQPPQIEHGTINSSRSSQESYAHGTKLSYTCEGGFRISEENETTCYMGKWSSPPQCEGLPCKSPPEISHGVVAHMSDSYQYGEEVTYKCFEGFGIDGPAIAKCLGEKWSHPPSCIKTDCLSLPSFENAIPMGEKKDVYKAGEQVTYTCATYYKMDGASNVTCINSRWTGRPTCRDTSCVNPPTVQNAYIVSRQMSKYPSGERVRYQCRSPYEMFGDEEVMCLNGNWTEPPQCKDSTGKCGPPPPIDNGDITSFPLSVYAPASSVEYQCQNLYQLEGNKRITCRNGQWSEPPKCLHPCVISREIMENYNIALRWTAKQKLYSRTGESVEFVCKRGYRLSSRSHTLRTTCWDGKLEYPTCAKR

SEQ ID NO: 44 - protein, 1406 aa, Homo sapiens
MALKNINYLLIFYLSFSLLIYIKNSFCNKNNTRCLSNSCQNNSTCKDFSKDNDCSCSDTANNLDKDCDNMKDPCFSNPCQGSATCVNTPGERSFLCKCPPGYSGTICETTIGSCGKNSCQHGGICHQDPIYPVCICPAGYAGRFCEIDHDECASSPCQNGAVCQDGIDGYSCFCVPGYQGRHCDLEVDECASDPCKNEATCLNEIGRYTCICPHNYSGVNCELEIDECWSQPCLNGATCQDALGAYFCDCAPGFLGDHCELNTDECASQPCLHGGLCVDGENRYSCNCTGSGFTGTHCETLMPLCWSKPCHNNATCEDSVDNYTCHCWPGYTGAQCEIDLNECNSNPCQSNGECVELSSEKQYGRITGLPSSFSYHEASGYVCICQPGFTGIHCEEDVNECSSNPCQNGGTCENLPGNYTCHCPFDNLSRTFYGGRDCSDILLGCTHQQCLNNGTCIPHFQDGQHGFSCLCPSGYTGSLCEIATTLSFEGDGFLWVKSGSVTTKGSVCNIALRFQTVQPMALLLFRSNRDVFVKLELLSGYIHLSIQVNNQSKVLLFISHNTSDGEWHFVEVIFAEAVTLTLIDDSCKEKCIAKAPTPLESDQSICAFQNSFLGGLPVGMTSNGVALLNFYNMPSTPSFVGCLQDIKIDWNHITLENISSGSSLNVKAGCVRKDWCESQPCQSRGRCINLWLSYQCDCHRPYEGPNCLREYVAGRFGQDDSTGYVIFTLDESYGDTISLSMFVRTLQPSGLLLALENSTYQYIRVWLERGRLAMLTPNSPKLVVKFVLNDGNVHLISLKIKPYKIELYQSSQNLGFISASTWKIEKGDVIYIGGLPDKQETELNGGFFKGCIQDVRLNNQNLEFFPNPTNNASLNPVLVNVTQGCAGDNSCKSNPCHNGGVCHSRWDDFSCSCPALTSGKACEEVQWCGFSPCPHGAQCQPVLQGFECIANAVFNGQSGQILFRSNGNITRELTNITFGFRTRDANVIILHAEKEPEFLNISIQDSRLFFQLQSGNSFYMLSLTSLQSVNDGTWHEVTLSMTDPLSQTSRWQMEVDNETPFVTSTIATGSLNFLKDNTDIYVGDRAIDNIKGLQGCLSTIEIGGIYLSYFENVHGFINKPQEEQFLKISTNSVVTGCLQLNVCNSNPCLHGGNCEDIYSSYHCSCPLGWSGKHCELNIDECFSNPCIHGNCSDRVAAYHCTCEPGYTGVNCEVDIDNCQSHQCANGATCISHTNGYSCLCFGNFTGKFCRQSRLPSTVCGNEKTNLTCYNGGNCTEFQTELKCMCRPGFTGEWCEKDIDECASDPCVNGGLCQDLLNKFQCLCDVAFAGERCEVDLADDLISDIFTTIGSVTVALLLILLLAIVASVVTSNKRATQGTYSPSRQEKEGSRVEMWNLMPPPAMERLI

SEQ ID NO: 45 - protein, 375 aa, Homo sapiens
MSSHKGSVVAQGNGAPASNREADTVELAELGPLLEEKGKRVIANPPKAEEEQTCPVPQEEEEEVRVLTLPLQAHHAMEKMEEFVYKVWEGRWRVIPYDVLPDWLKDNDYLLHGHRPPMPSFRACFKSIFRIHTETGNIWTHLLGFVLFLFLGILTMLRPNMYFMAPLQEKVVFGMFFLGAVLCLSFSWLFHTVYCHSEKVSRTFSKLDYSGIALLIMGSFVPWLYYSFYCSPQPRLIYLSIVCVLGISAIIVAQWDRFATPKHRQTRAGVFLGLGLSGVVPTMHFTIAEGFVKATTVGQMGWFFLMAVMYITGAGLYAARIPERFFPGKFDIWFQSHQIFHVLVVAAAFVHFYGVSNLQEFRYGLEGGCTDDTLL

SEQ ID NO: 46 - protein, 195 aa, Homo sapiens
MSLISWLRWNEAPSRLSTRSPAEMVLETLMMELTGQMREAERQQRERSNAVRKVCTGVDYSWLASTPRSTYDLSPIERLQLEDVCVKIHPSYCGPAILRFRQLLAEQEPEVQEVSQLFRSVLQEVLERMKQEEEAHKLTRQWSLRPRGSLATFKTRARISPFASDIRTISEDVERDTPPPLRSWSMPEFRAPKAD

SEQ ID NO: 47 - protein, 445 aa, Homo sapiens
MPSRAEDYEVLYTIGTGSYGRCQKIRRKSDGKILVWKELDYGSMTEAEKQMLVSEVNLLRELKHPNIVRYYDRIIDRTNTTLYIVMEYCEGGDLASVITKGTKERQYLDEEFVLRVMTQLTLALKECHRRSDGGHTVLHRDLKPANVFLDGKQNVKLGDFGLARILNHDTSFAKTFVGTPYYMSPEQMNRMSYNEKSDIWSLGCLLYELCALMPPFTAFSQKELAGKIREGKFRRIPYRYSDELNEIITRMLNLKDYHRPSVEEILENPLIADLVADEQRRNLERRGRQLGEPEKSQDSSPVLSELKLKEIQLQERERALKAREERLEQKEQELCVRERLAEDKLARAENLLKNYSLLKERKFLSLASNPELLNLPSSVIKKKVHFSGESKENIMRSENSESQLTSKSKCKDLKKRLHAAQLRAQALSDIEKNYQLKSRQILGMR

SEQ ID NO: 48 - protein, 555 aa, Homo sapiens
MARPDDEEGAAVAPGHPLAKGYLPLPRGAPVGKESVELQNGPKAGTFPVNGAPRDSLAAASGVLGGPQTPLAPEEETQARLLPAGAGAETPGAESSPLPLTALSPRRFVVLLIFSLYSLVNAFQWIQYSIISNVFEGFYGVTLLHIDWLSMVYMLAYVPLIFPATWLLDTRGLRLTALLGSGLNCLGAWIKCGSVQQHLFWVTMLGQCLCSVAQVFILGLPSRIASVWFGPKEVSTACATAVLGNQLGTAVGFLLPPVLVPNTQNDTNLLACNISTMFYGTSAVATLLFILTAIAFKEKPRYPPSQAQAALQDSPPEEYSYKKSIRNLFKNIPFVLLLITYGIMTGAFYSVSTLLNQMILTYYEGEEVNAGRIGLTLVVAGMVGSILCGLWLDYTKTYKQTTLIVYILSFIGMVIFTFTLDLRYIIIVFVTGGVLGFFMTGYLPLGFEFAVEITYPESEGTSSGLLNASAQIFGILFTLAQGKLTSDYGPKAGNIFLCVWMFIGIILTALIKSDLRRHNINIGITNVDVKAIPADSPTDQEPKTVMLSKQSESAI

SEQ ID NO: 49 - protein, 5202 aa, Homo sapiens
MNCPVLSLGSGFLFQVIEMLIFAYFASISLTESRGLFPRLENVGAFKKVSIVPTQAVCGLPDRSTFCHSSAAAESIQFCTQRFCIQDCPYRSSHPTYTALFSAGLSSCITPDKNDLHPNAHSNSASFIFGNHKSCFSSPPSPKLMASFTLAVWLKPEQQGVMCVIEKTVDGQIVFKLTISEKETMFYYRTVNGLQPPIKVMTLGRILVKKWIHLSVQVHQTKISFFINGVEKDHTPFNARTLSGSITDFASGTVQIGQSLNGLEQFVGRMQDFRLYQVALTNREILEVFSGDLLRLHAQSHCRCPGSHPRVHPLAQRYCIPNDAGDTADNRVSRLNPEAHPLSFVNDNDVGTSWVSNVFTNITQLNQGVTISVDLENGQYQVFYIIIQFFSPQPTEIRIQRKKENSLDWEDWQYFARNCGAFGMKNNGDLEKPDSVNCLQLSNFTPYSRGNVTFSILTPGPNYRPGYNNFYNTPSLQEFVKATQIRFHFHGQYYTTETAVNLRHRYYAVDEITISGRCQCHGHADNCDTTSQPYRCLCSQESFTEGLHCDRCLPLYNDKPFRQGDQVYAFNCKPCQCNSHSKSCHYNISVDPFPFEHFRGGGGVCDDCEHNTTGRNCELCKDYFFRQVGADPSAIDVCKPCDCDTVGTRNGSILCDQIGGQCNCKRHVSGRQCNQCQNGFYNLQELDPDGCSPCNCNTSGTVDGDITCHQNSGQCKCKANVIGLRCDHCNFGFKFLRSFNDVGCEPCQCNLHGSVNKFCNPHSGQCECKKEAKGLQCDTCRENFYGLDVTNCKACDCDTAGSLPGTVCNAKTGQCICKPNVEGRQCNKCLEGNFYLRQNNSFLCLPCNCDKTGTINGSLLCNKSTGQCPCKLGVTGLRCNQCEPHRYNLTIDNFQHCQMCECDSLGTLPGTICDPISGQCLCVPNRQGRRCNQCQPGFYISPGNATGCLPCSCHTTGAVNHICNSLTGQCVCQDASIAGQRCDQCKDHYFGFDPQTGRCQPCNCHLSGALNETCHLVTGQCFCKQFVTGSKCDACVPSASHLDVNNLLGCSKTPFQQPPPRGQVQSSSAINLSWSPPDSPNAHWLTYSLLRDGFEIYTTEDQYPYSIQYFLDTDLLPYTKYSYYIETTNVHGSTRSVAVTYKTKPGVPEGNLTLSYIIPIGSDSVTLTWTTLSNQSGPIEKYILSCAPLAGGQPCVSYEGHETSATIWNLVPFAKYDFSVQACTSGGCLHSLPITVTTAQAPPQRLSPPKMQKISSTELHVEWSPPAELNGIIIRYELYMRRLRSTKETTSEESRVFQSSGWLSPHSFVESANENALKPPQTMTTITGLEPYTKYEFRVLAVNMAGSVSSAWVSERTGESAPVFMIPPSVFPLSSYSLNISWEKPADNVTRGKVVGYDINMLSEQSPQQSIPMAFSQLLHTAKSQELSYTVEGLKPYRIYEFTITLCNSVGCVTSASGAGQTLAAAPAQLRPPLVKGINSTTIHLRWFPPEELNGPSPIYQLERRESSLPALMTTMMKGIRFIGNGYCKFPSSTHPVNTDFTGIKASFRTKVPEGLIVFAASPGNQEEYFALQLKKGRLYFLFDPQGSPVEVTTTNDHGKQYSDGKWHEIIAIRHQAFGQITLDGIYTGSSAILNGSTVIGDNTGVFLGGLPRSYTILRKDPEIIQKGFVGCLKDVHFMKNYNPSAIWEPLDWQSSEEQINVYNSWEGCPASLNEGAQFLGAGFLELHPYMFHGGMNFEISFKFRTDQLNGLLLFVYNKDGPDFLAMELKSGILTFRLNTSLAFTQVDLLLGLSYCNGKWNKVIIKKEGSFISASVNGLMKHASESGDQPLVVNSPVYVGGIPQELLNSYQHLCLEQGFGGCMKDVKFTRGAVVNLASVSSGAVRVNLDGCLSTDSAVNCRGNDSILVYQGKEQSVYEGGLQPFTEYLYRVIASHEGGSVYSDWSRGRTTGAAPQSVPTPSRVRSLNGYSIEVTWDEPVVRGVIEKYILKAYSEDSTRPPRMPSASAEFVNTSNLTGILTGLLPFKNYAVTLTACTLAGCTESSHALNISTPQEAPQEVQPPVAKSLPSSLLLSWNPPKKANGIITQYCLYMDGRLIYSGSEENYIVTDLAVFTPHQFLLSACTHVGCTNSSWVLLYTAQLPPEHVDSPVLTVLDSRTIHIQWKQPRKISGILERYVLYMSNHTHDFTIWSVIYNSTELFQDHMLQYVLPGNKYLIKLGACTGGGCTVSEASEALTDEDIPEGVPAPKAHSYSPDSFNVSWTEPEYPNGVITSYGLYLDGILIHNSSELSYRAYGFAPWSLHSFRVQACTAKGCALGPLVENRTLEAPPEGTVNVFVKTQGSRKAHVRWEAPFRPNGLLTHSVLFTGIFYVDPVGNNYTLLNVTKVMYSGEETNLWVLIDGLVPFTNYTVQVNISNSQGSLITDPITIAMPPGAPDGVLPPRLSSATPTSLQVVWSTPARNNAPGSPRYQLQMRSGDSTHGFLELFSNPSASLSYEVSDLQPYTEYMFRLVASNGFGSAHSSWIPFMTAEDKPGPVVPPILLDVKSRMMLVTWQHPRKSNGVITHYNIYLHGRLYLRTPGNVTNCTVMHLHPYTAYKFQVEACTSKGCSLSPESQTVWTLPGAPEGIPSPELFSDTPTSVIISWQPPTHPNGLVENFTIERRVKGKEEVTTLVTLPRSHSMRFIDKTSALSPWTKYEYRVLMSTLHGGTNSSAWVEVTTRPSRPAGVQPPVVTVLEPDAVQVTWKPPLIQNGDILSYEIHMPDPHITLTNVTSAVLSQKVTHLIPFTNYSVTIVACSGGNGYLGGCTESLPTYVTTHPTVPQNVGPLSVIPLSESYVVISWQPPSKPNGPNLRYELLRRKIQQPLASNPPEDLNRWHNIYSGTQWLYEDKGLSRFTTYEYMLFVHNSVGFTPSREVTVTTLAGLPERGANLTASVLNHTAIDVRWAKPTVQDLQGEVEYYTLFWSSATSNDSLKILPDVNSHVIGHLKPNTEYWIFISVFNGVHSINSAGLHATTCDGEPQGMLPPEVVIINSTAVRVIWTSPSNPNGVVTEYSIYVNNKLYKTGMNVPGSFILRDLSPFTIYDIQVEVCTIYACVKSNGTQITTVEDTPSDIPTPTIRGITSRSLQIDWVSPRKPNGIILGYDLLWKTWYPCAKTQKLVQDQSDELCKAVRCQKPESICGHICYSSEAKVCCNGVLYNPKPGHRCCEEKYIPFVLNSTGVCCGGRIQEAQPNHQCCSGYYARILPGEVCCPDEQHNRVSVGIGDSCCGRMPYSTSGNQICCAGRLHDGHGQKCCGRQIVSNDLECCGGEEGVVYNRLPGMFCCGQDYVNMSDTICCSASSGESKAHIKKNDPVPVKCCETELIPKSQKCCNGVGYNPLKYVCSDKISTGMMMKETKECRILCPASMEATEHCGRCDFNFTSHICTVIRGSHNSTGKASIEEMCSSAEETIHTGSVNTYSYTDVNLKPYMTYEYRISAWNSYGRGLSKAVRARTKEDVPQGVSPPTWTKIDNLEDTIVLNWRKPIQSNGPIIYYILLRNGIERFRGTSLSFSDKEGIQPFQEYSYQLKACTVAGCATSSKVVAATTQGVPESILPPSITALSAVALHLSWSVPEKSNGVIKEYQIRQVGKGLIHTDTTDRRQHTVTGLQPYTNYSFTLTACTSAGCTSSEPFLGQTLQAAPEGVWVTPRHIIINSTTVELYWSLPEKPNGLVSQYQLSRNGNLLFLGGSEEQNFTDKNLEPNSRYTYKLEVKTGGGSSASDDYIVQTPMSTPEEIYPPYNITVIGPYSIFVAWIPPGILIPEIPVEYNVLLNDGSVTPLAFSVGHHQSTLLENLTPFTQYEIRIQACQNGSCGVSSRMFVKTPEAAPMDLNSPVLKALGSACIEIKWMPPEKPNGIIINYFIYRRPAGIEEESVLFVWSEGALEFMDEGDTLRPFTLYEYRVRACNSKGSVESLWSLTQTLEAPPQDFPAPWAQATSAHSVLLNWTKPESPNGIISHYRVVYQERPDDPTFNSPTVHAFTVKGTSHQAHLYGLEPFTTYRIGVVAANHAGEILSPWTLIQTLESSPSGLRNFIVEQKENGRALLLQWSEPMRTNGVIKTYNIFSDGFLEYSGLNRQFLFRRLDPFTLYTLTLEACTRAGCAHSAPQPLWTDEAPPDSQLAPTVHSVKSTSVELSWSEPVNPNGKIIRYEVIRRCFEGKAWGNQTIQADEKIVFTEYNTERNTFMYNDTGLQPWTQCEYKIYTWNSAGHTCSSWNVVRTLQAPPEGLSPPVISYVSMNPQKLLISWIPPEQSNGIIQSYRLQRNEMLYPFSFDPVTFNYTDEELLPFSTYSYALQACTSGGCSTSKPTSITTLEAAPSEVSPPDLWAVSATQMNVCWSPPTVQNGKITKYLVRYDNKESLAGQGLCLLVSHLQPYSQYNFSLVACTNGGCTASVSKSAWTMEALPENMDSPTLQVTGSESIEITWKPPRNPNGQIRSYELRRDGTIVYTGLETRYRDFTLTPGVEYSYTVTASNSQGGILSPLVKDRTSPSAPSGMEPPKLQARGPQEILVNWDPPVRTNGDIINYTLFIRELFERETKIIHINTTHNSFGMQSYIVNQLKPFHRYEIRIQACTTLGCASSDWTFIQTPEIAPLMQPPPHLEVQMAPGGFQPTVSLLWTGPLQPNGKVLYYELYRRQIATQPRKSNPVLIYNGSSTSFIDSELLPFTEYEYQVWAVNSAGKAPSSWTWCRTGPAPPEGLRAPTFHVISSTQAVVNISAPGKPNGIVSLYRLFSSSAHGAETVLSEGMATQQTLHGLQAFTNYSIGVEACTCFNCCSKGPTAELRTHPAPPSGLSSPQIGTLASRTASFRWSPPMFPNGVIHSYELQFHVACPPDSALPCTPSQIETKYTGLGQKASLGGLQPYTTYKLRVVAHNEVGSTASEWISFTTQKELPQYRAPFSVDSNLSVVCVNWSDTFLLNGQLKEYVLTDGGRRVYSGLDTTLYIPRTADKTFFFQVICTTDEGSVKTPLIQYDTSTGLGLVLTTPGKKKGSRSKSTEFYSELWFIVLMAMLGLILLAIFLSLILQRKIHKEPYIRERPPLVPLQKRMSPLNVYPPGENHMGLADTKIPRSGTPVSIRSNRSACVLRIPSQNQTSLTYSQGSLHRSVSQLMDIQDKKVLMDNSLWEAIMGHNSGLYVDEEDLMNAIKDFSSVTKERTTFTDTHL

SEQ ID NO: 50 - protein, 713 aa, Homo sapiens
MAKSPENSTLEEILGQYQRSLREHASRSIHQLTCALKEGDVTIGEDAPNLSFSTSVGNEDARTAWPELQQSHAVNQLKDLLRQQADKESEVSPSRRRKMSPLRSLEHEETNMPTMHDLVHTINDQSQYIHHLEAEVKFCKEELSGMKNKIQVVVLENEGLQQQLKSQRQEETLREQTLLDASGNMHNSWITTGEDSGVGETSKRPFSHDNADFGKAASAGEQLELEKLKLTYEEKCEIEESQLKFLRNDLAEYQRTCEDLKEQLKHKEFLLAANTCNRVGGLCLKCAQHEAVLSQTHTNVHMQTIERLVKERDDLMSALVSVRSSLADTQQREASAYEQVKQVLQISEEANFEKTKALIQCDQLRKELERQAERLEKELASQQEKRAIEKDMMKKEITKEREYMGSKMLILSQNIAQLEAQVEKVTKEKISAINQLEEIQSQLASREMDVTKVCGEMRYQLNKTNMEKDEAEKEHREFRAKTNRDLEIKDQEIEKLRIELDESKQHLEQEQQKAALAREECLRLTELLGESEHQLHLTRQEKDSIQQSFSKEAKAQALQAQQREQELTQKIQQMEAQHDKTENEQYLLLTSQNTFLTKLKEECCTLAKKLEQISQKTRSEIAQLSQEKRYTYDKLGKLQRRNEELEEQCVQHGRVHETMKQRLRQLDKHSQATAQQLVQLLSKQNQLLLERQSLSEEVDRLRTQLPSMPQSDC

SEQ ID NO: 51 - protein, 314 aa, Homo sapiens
MDGTNGSTQTHFILLGFSDRPHLERILFVVILIAYLLTLVGNTTIILVSRLDPHLHTPMYFFLAHLSFLDLSFTTSSIPQLLYNLNGCDKTISYMGCAIQLFLFLGLGGVECLLLAVMAYDRCVAICKPLHYMVIMNPRLCRGLVSVTWGCGVANSLAMSPVTLRLPRCGHHEVDHFLREMPALIRMACVSTVAIEGTVFVLAVGVVLSPLVFILLSYSYIVRAVLQIRSASGRQKAFGTCGSHLTVVSLFYGNIIYMYMQPGASSSQDQGMFLMLFYNIVTPLLNPLIYTLRNREVKGALGRLLLGKRELGKE

SEQ ID NO: 52 - protein, 2371 aa, Homo sapiens
MAAPESGPALSPGTAEGEEETILYDLLVNTEWPPETEVQPRGNQKHGASFIITKAIRDRLLFLRQYIWYSPAPFLLPDGLVRLVNKQINWHLVLASNGKLLAAVQDQCVEIRSAKDDFTSIIGKCQVPKDPKPQWRRVAWSYDCTLLAYAESTGTVRVFDLMGSELFVISPASSFIGDLSYAIAGLIFLEYKASAQWSAELLVINYRGELRSYLVSVGTNQSYQESHCFSFSSHYPHGINTAIYHPGHRLLLVGGCETAEVGMSKASSCGLSAWRVLSGSPYYKQVTNGGDGVTAVPKTLGLLRMLSVKFYSRQGQEQDGIFKMSLSPDGMLLAAIHFSGKLSIWAIPSLKQQGEWGQNEQPGYDDLNPDWRLSTEKRKKIKDKESFYPLIDVNWWADSAVTLARCSGALTVSSVKTLKNLLGKSCEWFEPSPQVTATHDGGFLSLECEIKLAPKRSRLETRAGEEDEGEEDSDSDYEISAKARYFGYIKQGLYLVTEMERFAPPRKRPRTITKNYRLVSLRSTTPEELYQRKIESEEYEEALSLAHTYGLDTDLVYQRQWRKSAVNVASIQNYLSKIKKRSWVLHECLERVPENVDAAKELLQYGLKGTDLEALLAIGKGADDGRFTLPGEIDIDSISYEELSPPDEEPAKNKKEKELKKRQELLKLVNFSKLTLEQKELCRCRRKLLTYLDRLATYEEILGVPHASEQRYDAEFFKKFRNQNIVLSARTYAQESNVQALEILFTYHGSDLLPHRLAILSNFPETTSPHEYSVLLPEACFNGDSLMIIPWHEHKHRAKDWCEELACRMVVEPNLQDESEFLYAAQPELLRFRMTQLTVEKVMDWYQTRAEEIEHYARQVDCALSLIRLGMERNIPGLLVLCDNLVTLETLVYEARCDVTLTLKELQQMKDIEKLRLLMNSCSEDKYVTSAYQWMVPFLHRCEKQSPGVANELLKEYLVTLAKGDLKFPLKIFQHSKPDLQQKIIPDQDQLMAIALECIYTCERNDQLCLCYDLLECLPERGYGDKTEATTKLHDMVDQLEQILSVSELLEKHGLEKPISFVKNTQSSSEEARKLMVRLTRHTGRKQPPVSESHWRTLLQDMLTMQQNVYTCLDSDACYEIFTESLLCSSRLENIHLAGQMMHCSACSENPPAGIAHKGKPHYRVSYEKSIDLVLAASREYFNSSTNLTDSCMDLARCCLQLITDRPPAIQEELDLIQAVGCLEEFGVKILPLQVRLCPDRISLIKECISQSPTCYKQSTKLLGLAELLRVAGENPEERRGQVLILLVEQALRFHDYKAASMHCQELMATGYPKSWDVCSQLGQSEGYQDLATRQELMAFALTHCPPSSIELLLAASSSLQTEILYQRVNFQIHHEGGENISASPLTSKAVQEDEVGVPGSNSADLLRWTTATTMKVLSNTTTTTKAVLQAVSDGQWWKKSLTYLRPLQGQKCGGAYQIGTTANEDLEKQGCHPFYESVISNPFVAESEGTYDTYQHVPVESFAEVLLRTGKLAEAKNKGEVFPTTEVLLQLASEALPNDMTLALAYLLALPQVLDANRCFEKQSPSALSLQLAAYYYSLQIYARLAPCFRDKCHPLYRADPKELIKMVTRHVTRHEHEAWPEDLISLTKQLHCYNERLLDFTQAQILQGLRKGVDVQRFTADDQYKRETILGLAETLEESVYSIAISLAQRYSVSRWEVFMTHLEFLFTDSGLSTLEIENRAQDLHLFETLKTDPEAFHQHMVKYIYPTIGGFDHERLQYYFTLLENCGCADLGNCAIKPETHIRLLKKFKVVASGLNYKKLTDENMSPLEALEPVLSSQNILSISKLVPKIPEKDGQMLSPSSLYTIWLQKLFWTGDPHLIKQVPGSSPEWLHAYDVCMKYFDRLHPGDLITVVDAVTFSPKAVTKLSVEARKEMTRKAIKTVKHFIEKPRKRNSEDEAQEAKDSKVTYADTLNHLEKSLAHLETLSHSFILSLKNSEQETLQKYSHLYDLSRSEKEKLHDEAVAICLDGQPLAMIQQLLEVAVGPLDISPKDIVQSAIMKIISALSGGSADLGGPRDPLKVLEGVVAAVHASVDKGEELVSPEDLLEWLRPFCADDAWPVRPRIHVLQILGQSFHLTEEDSKLLVFFRTEAILKASWPQRQVDIADIENEENRYCLFMELLESSHHEAEFQHLVLLLQAWPPMKSEYVITNNPWVRLATVMLTRCTMENKEGLGNEVLKMCRSLYNTKQMLPAEGVKELCLLLLNQSLLLPSLKLLLESRDEHLHEMALEQITAVTTVNDSNCDQELLSLLLDAKLLVKCVSTPFYPRIVDHLLASLQQGRWDAEELGRHLREAGHEAEAGSLLLAVRGTHQAFRTFSTALRAAQHWV

SEQ ID NO: 53 - protein, 886 aa, Homo sapiens
MELRCGGLLFSSRFDSGNLAHVEKVESLSSDGEGVGGGASALTSGIASSPDYEFNVWTRPDCAETEFENGNRSWFYFSVRGGMPGKLIKINIMNMNKQSKLYSQGMAPFVRTLPTRPRWERIRDRPTFEMTETQFVLSFVHRFVEGRGATTFFAFCYPFSYSDCQELLNQLDQRFPENHPTHSSPLDTIYYHRELLCYSLDGLRVDLLTITSCHGLREDREPRLEQLFPDTSTPRPFRFAGKRIFFLSSRVHPGETPSSFVFNGFLDFILRPDDPRAQTLRRLFVFKLIPMLNPDGVVRGHYRTDSRGVNLNRQYLKPDAVLHPAIYGAKAVLLYHHVHSRLNSQSSSEHQPSSCLPPDAPVSDLEKANNLQNEAQCGHSADRHNAEAWKQTEPAEQKLNSVWIMPQQSAGLEESAPDTIPPKESGVAYYVDLHGHASKRGCFMYGNSFSDESTQVENMLYPKLISLNSAHFDFQGCNFSEKNMYARDRRDGQSKEGSGRVAIYKASGIIHSYTLECNYNTGRSVNSIPAACHDNGRASPPPPPAFPSRYTVELFEQVGRAMAIAALDMAECNPWPRIVLSEHSSLTNLRAWMLKHVRNSRGLSSTLNVGVNKKRGLRTPPKSHNGLPVSCSENTLSRARSFSTGTSAGGSSSSQQNSPQMKNSPSFPFHGSRPAGLPGLGSSTQKVTHRVLGPVREPRSQDRRRQQQPLNHRPAGSLAPSPAPTSSGPASSHKLGSCLLPDSFNIPGSSCSLLSSGDKPEAVMVIGKGLLGTGARMPCIKTRLQARPRLGRGSPPTRRGMKGSSGPTSPTPRTRESSELELGSCSATPGLPQARPPRPRSAPAFSPISCSLSDSPSWNCYSRGPLGQPEVCFVPKSPPLTVSPRV

SEQ ID NO: 54 - protein, 541 aa, Homo sapiens
MPRRKQSHPQPVKCEGVKVDTEDSLDEGPGALVLESDLLLGQDLEFEEEEEEEEGDGNSDQLMGFERDSEGDSLGARPGLPYGLSDDESGGGRALSAESEVEEPARGPGEARGERPGPACQLCGGPTGEGPCCGAGGPGGGPLLPPRLLYSCRLCTFVSHYSSHLKRHMQTHSGEKPFRCGRCPYASAQLVNLTRHTRTHTGEKPYRCPHCPFACSSLGNLRRHQRTHAGPPTPPCPTCGFRCCTPRPARPPSPTEQEGAVPRRPEDALLLPDLSLHVPPGGASFLPDCGQLRGEGEGLCGTGSEPLPELLFPWTCRGCGQELEEGEGSRLGAAMCGRCMRGEAGGGASGGPQGPSDKGFACSLCPFATHYPNHLARHMKTHSGEKPFRCARCPYASAHLDNLKRHQRVHTGEKPYKCPLCPYACGNLANLKRHGRIHSGDKPFRCSLCNYSCNQSMNLKRHMLRHTGEKPFRCATCAYTTGHWDNYKRHQKVHGHGGAGGPGLSASEGWAPPHSPPSVLSSRGPPALGTAGSRAVHTDSS

SEQ ID NO: 55 - protein, 1749 aa, Homo sapiens
MHLKHLRTLLSPQDGAAKVTCMAWSQNNAKFAVCTVDRVVLLYDEHGERRDKFSTKPADMKYGRKSYMVKGMAFSPDSTKIAIGQTDNIIYVYKIGEDWGDKKVICNKFIQTSAVTCLQWPAEYIIVFGLAEGKVRLANTKTNKSSTIYGTESYVVSLTTNCSGKGILSGHADGTIVRYFFDDEGSGESQGKLVNHPCPPYALAWATNSIVAAGCDRKIVAYGKEGHMLQTFDYSRDPQEREFTTAVSSPGGQSVVLGSYDRLRVFNWIPRRSIWEEAKPKEITNLYTITALAWKRDGSRLCVGTLCGGVEQFDCCLRRSIYKNKFELTYVGPSQVIVKNLSSGTRVVLKSHYGYEVEEVKILGKERYLVAHTSETLLLGDLNTNRLSEIAWQGSGGNEKYFFENENVCMIFNAGELTLVEYGNNDTLGSVRTEFMNPHLISVRINERCQRGTEDNKKLAYLIDIKTIAIVDLIGGYNIGTVSHESRVDWLELNETGHKLLFRDRKLRLHLYDIESCSKTMILNFCSYMQWVPGSDVLVAQNRNSLCVWYNIEAPERVTMFTIRGDVIGLERGGGKTEVMVMEGVTTVAYTLDEGLIEFGTAIDDGNYIRATAFLETLEMTPETEAMWKTLSKLALEARQLHIAERCFSALGQVAKARFLHETNEIADQVSREYGGEGTDFYQVRARLAMLEKNYKLAEMIFLEQNAVEEAMGMYQELHRWDECIAVAEAKGHPALEKLRRSYYQWLMDTQQEERAGELQESQGDGLAAISLYLKAGLPAKAARLVLTREELLANTELVEHITAALIKGELYERAGDLFEKIHNPQKALECYRKGNAFMKAVELARLAFPVEVVKLEEAWGDHLVQQKQLDAAINHYIEARCSIKAIEAALGARQWKKAIYILDLQDRNTASKYYPLVAQHYASLQEYEIAEELYTKGDRTKDAIDMYTQAGRWEQAHKLAMKCMRPEDVSVLYITQAQEMEKQGKYREAERLYVTVQEPDLAITMYKKHKLYDDMIRLVGKHHPDLLSDTHLHLGKELEAEGRLQEAEYHYLEAQEWKATVNMYRASGLWEEAYRVARTQGGANAHKHVAYLWAKSLGGEAAVRLLNKLGLLEAAVDHAADNCSFEFAFELSRLALKHKTPEVHLKYAMFLEDEGKFEEAEAEFIRAGKPKEAVLMFVHNQDWEAAQRVAEAHDPDSVAEVLVGQARGALEEKDFQKAEGLLLRAQRPGLALNYYKEAGLWSDALRICKDYVPSQLEALQEEYEREATKKGARGVEGFVEQARHWEQAGEYSRAVDCYLKVRDSGNSGLAEKCWMKAAELSIKFLPPQRNMEVVLAVGPQLIGIGKHSAAAELYLNLDLVKEAIDAFIEGEEWNKAKRVAKELDPRYEDYVDQHYKEFLKNQGKVDSLVGVDVIAALDLYVEQGQWDKCIETATKQNYKILHKYVALYATHLIREGSSAQALALYVQHGAPANPQNFNIYKRIFTDMVSSPGTNCAEAYHSWADLRDVLFNLCENLVKSSEANSPAHEEFKTMLLIAHYYATRSAAQSVKQLETVAARLSVSLLRHTQLLPVDKAFYEAGIAAKAVGWDNMAFIFLNRFLDLTDAIEEGTLDGLDHSDFQDTDIPFEVPLPAKQHVPEAEREEVRDWVLTVSMDQRLEQVLPRDERGAYEASLVAASTGVRALPCLITGYPILRNKIEFKRPGKAANKDNWNKFLMAIKTSHSPVCQDVLKFISQWCGGLPSTSFSFQ

SEQ ID NO: 56 - protein, 1288 aa, Homo sapiens
MGCTPSHSDLVNSVAKSGIQFLKKPKAIRPGCQGGSERGSIPLLVKNSTCYDAGEGLAEEQPSPRRNQTTAKGLCQLMGDPASGKRKDMEGLIPGTKTSSSQLNKSQSHMAKDIPFKTQGSHGSQGADFSGDESEESSTQDTSKWKRTAKCHTSSTQSHCYQTIHPAHEPEGKVDFPEPLVKAHQQAYTYLHSSLSKYEAILCIIHQATQTRELLQPMVSFLLLCFEEISQLLGEISKDGEVLLQEVREDLAWPLKKREPQEQPNLLQQLLQYTVSKLQVLNGTVASLTGSFLEGSSSYLHSTATHLENKLSTKRNVDERLLRALRQLESLASGCGDPGVQGLPLCSEDSGIGADNESVQSVDKLGKQTSWDLAPEPEEWKSVTSPHTEARQSGHTWQQSPFCLGSGRPQDCLLSGAPMAKVQPRAQDEARSPCLSSTSPENITSPPLKLGTSTPCDSFGIGVSVEPHLSKTSRPMDASSLSDSEDSSPEEEEEDKMSSMSLCAWQEKTPHSRPQSSPADRESPFQARTRRLRSLQAQEMILKMKESISERIKFVPVPCGHQDWSEEEEGRTVVPPRPSTVSGSRRAPERQTRSQSESCLQSHVEDPTFQELRRVQRDLSQKLEAFYALGAKGQGQSQEQILQPRAAAVWPNGTCRVSPSNTTSRLKASLTKNFSILPSQDKSILQKCNPHPEDEQGKAGKLPNAIPSGEVSEAAKATDWNVRGCPTRTSVKKLIETFSPTESLRMLGDSKDAGASPCLRNCIMPPRFPKYTGLAPLYPKPQISPASGRESLKMGIGWKPLAPIFPPLPKAEAAKSEELSCEMEGNLEHLPPPPMEVLMDKSFASLESPESSKSTENSPKETQEPGPGEAGPTRRTWASPKLRASVSPLDLLPSKSTASLTKPHSTGPGSGRSSCQPRKPALDLSSPPATSQSPEVKGGTWSQAEKATSLYRQPRKAIAWHHSGPPSGQNRTSESSLARPRQSRERSPPVGRKASPTRTHWVPQADKRRRSLPSSYRPAQPSPSAVQTPPSPPVSPRVLSPPTTKRRTSPPHQPKLPNPPPESAPAQCKVPSPPTQHPEASPPFSIPSPSPPMSPSQEHKETRDSEDSQAVIAKVSGNTHSIFCPATSSLFEAKPPLSTAHPLTPPSLPPEAGGPLGNPAECWKNSSGPWLRADSQRRAALCALNPLPFLRRTASDRQPGGRPQPPTLDPTSTSYESQLGQNSSSEESPKKDTEPGSSPCSPELQGGTRRASPPEFCVLGHGLQPEPRTGHIQDKSQPEAQPQQEEVS

SEQ ID NO: 57 - protein, 197 aa, Homo sapiens
MMFPQSRHSGSSHLPQQLKFTTSDSCDRIKDEFQLLQAQYHSLKLECDKLASEKSEMQRHYVMYYEMSYGLNIEMHKQAEIVKRLNGICAQVLPYLSQEHQQQVLGAIERAKQVTAPELNSIIRQQLQAHQLSQLQALALPLTPLPVGLQPPSLPAVSAGTGLLSLSALGSQAHLSKEDKNGHDGDTHQEDDGEKSD

SEQ ID NO: 58 - protein, 660 aa, Homo sapiens
MATSHRVAKLVASSLQTPVNPITGARVAQYEREDPLKALAAAEAILEDEEEEKVAQPAGASADLNTSFSGVDEHAPISYEDFVNFPDIHHSNEEYFKKVEELKAAHIETMAKLEKMYQDKLHLKEVQPVVIREDSLSDSSRSVSEKNSYHPVSLMTSFSEPDLGQSSSLYVSSSEEELPNLEKEYPRKNRMMTYAKELINNMWTDFCVEDYIRCKDTGFHAAEKRRKKRKEWVPTITVPEPFQMMIREQKKKEESMKSKSDIEMVHKALKKQEEDPEYKKKFRANPVPASVFLPLYHDLVKQKEERRRSLKEKSKEALLASQKPFKFIAREEQKRAAREKQLRDFLKYKKKTNRFKARPIPRSTYGSTTNDKLKEEELYRNLRTQLRAQEHLQNSSPLPCRSACGCRNPRCPEQAVKLKCKHKVRCPTPDFEDLPERYQKHLSEHKSPKLLTVCKPFDLHASPHASIKREKILADIEADEENLKETRWPYLSPRRKSPVRCAGVNPVPCNCNPPVPTVSSRGREQAVRKSEKERMREYQRELEEREEKLKKRPLLFERVAQKNARMAAEKHYSNTLKALGISDEFVSKKGQSGKVLEYFNNQETKSVTEDKESFNEEEKIEERENGEENYFIDTNSQDSYKEKDEANEESEEEKSVEESH

SEQ ID NO: 59 - protein, 746 aa, Homo sapiens
MRREFCWDAYSKAAGSRASSPLPRQDRDSFCHQMSFCLTELHLWSLKNTLHIADRDIGIYQYYDKKDPPATEHGNLEKKQKLAESRDYPWTLKNRRPEKLRDSLKELEELMQNSRCVLSKWKNKYVCQLLFGSGVLVSLSLSGPQLEKVVIDRSLVGKLISDTISDALLTDSFIILSFLAQNKLCFIQFTKKMESSDVNKRLEKLSALDYKIFYYEIPGPINKTTERHLAINCVHDRVVCWWPLVNDDAWPWAPISSEKDRANLLLLGYAQGRLEVLSSVRTEWDPLDVRFGTKQPYQVFTVEHSVSVDKEPMADSCIYECIRNKIQCVSVTRIPLKSKAISCCRNVTEDKLILGCEDSSLILYETHRRVTLLAQTELLPSLISCHPSGAILLVGSNQGELQIFDMALSPINIQLLAEDRLPRETLQFSKLFDASSSLVQMQWIAPQVVSQKGEGSDIYDLLFLRFERGPLGVLLFKLGVFTRGQLGLIDIIFQYIHCDEIYEAINILSSMNWDTLGHQCFISMSAIVNHLLRQKLTPEREAQLETSLGTFYAPTRPLLDSTILEYRDQISKYARRFFHHLLRYQRFEKAFLLAVDVGARDLFMDIHYLALDKGELALAEVARKRASDIDAESITSGVELLGPLDRGDMLNEAFIGLSLAPQGEDSFPDNLPPSCPTHRHILQQRILNGSSNRQIIDRRNELEKDICSGFLMTNTCNAEDGELREDGREQEIRDGGSLKMIHFGLV

SEQ ID NO: 60 - protein, 4168 aa, Homo sapiens
MEPEDLPWPGELEEEEEEEEEEEEEEEEAAAAAAANVDDVVVVEEVEEEAGRELDSDSHYGPQHLESIDDEEDEEAKAWLQAHPGRILPPLSPPQHRYSEGERTSLEKIVPLTCHVWQQIVYQGNSRTQISDTNVVCLETTAQRGSGDDQKTESWHCLPQEMDSSQTLDTSQTRFNVRTEDTEVTDFPSLEEGILTQSENQVKEPNRDLFCSPLLVIQDSFASPDLPLLTCLTQDQEFAPDSLFHQSELSFAPLRGIPDKSEDTEWSSRPSEVSEALFQATAEVASDLASSRFSVSQHPLIGSTAVGSQCPFLPSEQGNNEETISSVDELKIPKDCDRYDDLCSYMSWKTRKDTQWPENNLADKDQVSVATSFDITDENIATKRSDHFDAARSYGQYWTQEDSSKQAETYLTKGLQGKVESDVITLDGLNENAVVCSERVAELQRKPTRESEYHSSDLRMLRMSPDTVPKAPKHLKAGDTSKGGIAKVTQSNLKSGITTTPVDSDIGSHLSLSLEDLSQLAVSSPLETTTGQHTDTLNQKTLADTHLTEETLKVTAIPEPADQKTATPTVLSSSHSHRGKPSIFYQQGLPDSHLTEEALKVSAAPGLADQTTGMSTLTSTSYSHREKPGTFYQQELPESNLTEEPLEVSAAPGPVEQKTGIPTVSSTSHSHVEDLLFFYRQTLPDGHLTDQALKVSAVSGPADQKTGTATVLSTPHSHREKPGIFYQQEFADSHQTEETLTKVSATPGPADQKTEIPAVQSSSYSQREKPSILYPQDLADSHLPEEGLKVSAVAGPADQKTGLPTVPSSAYSHREKLLVFYQQALLDSHLPEEALKVSAVSGPADGKTGTPAVTSTSSASSSLGEKPSAFYQQTLPNSHLTEEALKVSIVPGPGDQKTGIPSAPSSFYSHREKPIIFSQQTLPDFLFPEEALKVSAVSVLAAQKTGTPTVSSNSHSHSEKSSVFYQQELPDSDLPRESLKMSAIPGLTDQKTVPTPTVPSGSFSHREKPSIFYQQEWPDSYATEKALKVSTGPGPADQKTEIPAVQSSSYPQREKPSVLYPQVLSDSHLPEESLKVSAFPGPADQMTDTPAVPSTFYSQREKPGIFYQQTLPESHLPKEALKISVAPGLADQKTGTPTVTSTSYSQHREKPSIFHQQALPGTHIPEEAQKVSAVTGPGNQKTWIPRVLSTFYSQREKPGIFYQQTLPGSHIPEEAQKVSPVLGPADQKTGTPTPTSASYSHTEKPGIFYQQVLPDNHPTEEALKISVASEPVDQTTGTPAVTSTSYSQYREKPSIFYQQSLPSSHLTEEAKNVSAVPGPADQKTVIPILPSTFYSHTEKPGVFYQQVLPHSHPTEEALKISVASEPVDQTTGTPTVTSTSYSQHTEKPSIFYQQSLPGSHLTEEAKNVSAVPGPGDRKTGIPTLPSTFYSHTEKPGSFYQQVLPHSHLPEEALEVSVAPGPVDQTIGTPTVTSPSSSFGEKPIVIYKQAFPEGHLPEESLKVSVAPGPVGQTTGAPTITSPSYSQHRAKSGSFYQLALLGSQIPEEALRVSSAPGPADQTTGIPTITSTSYSFGEKPIVNYKQAFPDGHLPEEALKVSIVSGPTEKKTDIPAGPLGSSALGEKPITFYRQALLDSPLNKEVVKVSAAPGPADQKTETLPVHSTSYSNRGKPVIFYQQTLSDSHLPEEALKVPPVPGPDAQKTETPSVSSSLYSYREKPIVFYQQALPDSELTQEALKVSAVPQPADQKTGLSTVTSSFYSHTEKPNISYQQELPDSHLTEEALKVSNVPGPADQKTGVSTVTSTSYSHREKPIVSYQRELPHFTEAGLKILRVPGPADQKTGINILPSNSYPQREHSVISYEQELPDLTEVTLKAIGVPGPADQKTGIQIASSSSYSNREKASIFHQQELPDVTEEALNVFVVPGQGDRKTEIPTVPLSYYSRREKPSVISQQELPDSHLTEEALKVSPVSIPAEQKTGIPIGLSSSYSHSHKEKLKISTVHIPDDQKTEFPAATLSSYSQIEKPKISTVIGPNDQKTPSQTAFHSSYSQTVKPNILFQQQLPDRDQSKGILKISAVPELTDVNTGKPVSLSSSYFHREKSNIFSPQELPGSHVTEDVLKVSTIPGPAGQKTVLPTALPSSFSHREKPDIFYQKDLPDRHLTEDALKISSALGQADQITGLQTVPSGTYSHGENHKLVSEHVQRLIDNLNSSDSSVSSNNVLLNSQADDRVVINKPESAGFRDVGSEEIQDAENSAKTLKEIRTLLMEAENMALKRCNFPAPLARFRDISDISFIQSKKVVCFKEPSSTGVSNGDLLHRQPFTEESPSSRCIQKDIGTQTNLKCRRGIENWEFISSTTVRSPLQEAESKVSMALEETLRQYQAAKSVMRSEPEGCSGTIGNKIIIPMMTVIKSDSSSDASDGNGSCSWDSNLPESLESVSDVLLNFFPYVSPKTSITDSREEEGVSESEDGGGSSVDSLAAHVKNLLQCESSLNHAKEILRNAEEEESRVRAHAWNMKFNLAHDCGYSISELNEDDRRKVEEIKAELFGHGRTTDLSKGLQSPRGMGCKPEAVCSHIIIESHEKGCFRTLTSEHPQLDRHPCAFRSAGPSEMTRGRQNPSSCRAKHVNLSASLDQNNSHFKVWNSLQLKSHSPFQNFIPDEFKISKGLRMPFDEKMDPWLSELVEPAFVPPKEVDFHSSSQMPSPEPMKKFTTSITFSSHRHSKCISNSSVVKVGVTEGSQCTGASVGVFNSHFTEEQNPPRDLKQKTSSPSSFKMHSNSQDKEVTILAEGRRQSQKLPVDFERSFQEEKPLERSDFTGSHSEPSTRANCSNFKEIQISDNHTLISMGRPSSTLGVNRSSSRLGVKEKNVTITPDLPSCIFLEQRELFEQSKAPRADDHVRKHHSPSPQHQDYVAPDLPSCIFLEQRELFEQCKAPYVDHQMRENHSPLPQGQDSIASDLPSPISLEQCQSKAPGVDDQMNKHHFPLPQGQDCVVEKNNQHKPKSHISNINVEAKFNTVVSQSAPNHCTLAASASTPPSNRKALSCVHITLCPKTSSKLDSGTLDERFHSLDAASKARMNSEFNFDLHTVSSRSLEPTSKLLTSKPVAQDQESLGFLGPKSSLDFQVVQPSLPDSNTITQDLKTIPSQNSQIVTSRQIQVNISDFEGHSNPEGTPVFADRLPEKMKTPLSAFSEKLSSDAVTQITTESPEKTLFSSEIFINAEDRGHEIIEPGNQKLRKAPVKFASSSSVQQVTFSRGTDGQPLLLPYKPSGSTKMYYVPQLRQIPPSPDSKSDTTVESSHSGSNDAIAPDFPAQVLGTRDDDLSATVNIKHKEGIYSKRVVTKASLPVGEKPLQNENADASVQVLITGDENLSDKKQQEIHSTRAVTEAAQAKEKESLQKDTADSSAAAAAEHSAQVGDPEMKNLPDTKAITQKEEIHRKKTVPEEAWPNNKESLQINIEESECHSEFENTTRSVFRSAKFYIHHPVHLPSDQDICHESLGKSVFMRHSWKDFFQHHPDKHREHMCLPLPYQNMDKTKTDYTRIKSLSINVNLGNKEVMDTTKSQVRDYPKHNGQISDPQRDQKVTPEQTTQHTVSLNELWNKYRERQRQQRQPELGDRKELSLVDRLDRLAKILQNPITHSLQVSESTHDDSRGERSVKEWSGRQQQRNKLQKKKRFKSLEKSHKNTGELKKSKVLSHHRAGRSNQIKIEQIKFDKYILSKQPGFNYISNTSSDCRPSEESELLTDTTTNILSGTTSTVESDILTQTDREVALHERSSSVSTIDTARLIQAFGHERVCLSPRRIKLYSSITNQQRRYLEKRSKHSKKVLNTGHPLVTSEHTRRRHIQVANHVISSDSISSSASSFLSSNSTFCNKQNVHMLNKGIQAGNLEIVNGAKKHTRDVGITFPTPSSSEAKLEENSDVTSWSEEKREEKMLFTGYPEDRKLKKNKKNSHEGVSWFVPVENVESRSKKENVPNTCGPGISWFEPITKTRPWREPLREQNCQGQHLDGRGYLAGPGREAGRDLLRPFVRATLQESLQFHRPDFISRSGERIKRLKLIVQERKLQSMLQTERDALFNIDRERQGHQNRMCPLPKRVFLAIQKNKPISKKEMIQRSKRIYEQLPEVQKKREEEKRKSEYKSYRLRAQLYKKRVTNQLLGRKVPWD

SEQ ID NO: 61 - protein, 2136 aa, Homo sapiens
MADVTARSLQYEYKANSNLVLQADRSLIDRTRRDEPTGEVLSLVGKLEGTRMGDKAQRTKPQMQEERRAKRRKRDEDRHDINKMKGYTLLSEGIDEMVGIIYKPKTKETRETYEVLLSFIQAALGDQPRDILCGAADEVLAVLKNEKLRDKERRKEIDLLLGQTDDTRYHVLVNLGKKITDYGGDKEIQNMDDNIDETYGVNVQFESDEEEGDEDVYGEVREEASDDDMEGDEAVVRCTLSANLVASGELMSSKKKDLHPRDIDAFWLQRQLSRFYDDAIVSQKKADEVLEILKTASDDRECENQLVLLLGFNTFDFIKVLRQHRMMILYCTLLASAQSEAEKERIMGKMEADPELSKFLYQLHETEKEDLIREERSRRERVRQSRMDTDLETMDLDQGGEALAPRQVLDLEDLVFTQGSHFMANKRCQLPDGSFRRQRKGYEEVHVPALKPKPFGSEEQLLPVEKLPKYAQAGFEGFKTLNRIQSKLYRAALETDENLLLCAPTGAGKTNVALMCMLREIGKHINMDGTINVDDFKIIYIAPMRSLVQEMVGSFGKRLATYGITVAELTGDHQLCKEEISATQIIVCTPEKWDIITRKGGERTYTQLVRLIILDEIHLLHDDRGPVLEALVARAIRNIEMTQEDVRLIGLSATLPNYEDVATFLRVDPAKGLFYFDNSFRPVPLEQTYVGITEKKAIKRFQIMNEIVYEKIMEHAGKNQVLVFVHSRKETGKTARAIRDMCLEKDTLGLFLREGSASTEVLRTEAEQCKNLELKDLLPYGFAIHHAGMTRVDRTLVEDLFADKHIQVLVSTATLAWGVNLPAHTVIIKGTQVYSPEKGRWTELGALDILQMLGRAGRPQYDTKGEGILITSHGELQYYLSLLNQQLPIESQMVSKLPDMLNAEIVLGNVQNAKDAVNWLGYAYLYIRMLRSPTLYGISHDDLKGDPLLDQRRLDLVHTAALMLDKNNLVKYDKKTGNFQVTELGRIASHYYITNDTVQTYNQLLKPTLSEIELFRVFSLSSEFKNITVREEEKLELQKLLERVPIPVKESIEEPSAKINVLLQAFISQLKLEGFALMADMVYVTQSAGRLMRAIFEIVLNRGWAQLTDKTLNLCKMIDKRMWQSMCPLRQFRKLPEEVVKKIEKKNFPFERLYDLNHNEIGELIRMPKMGKTIHKYVHLFPKLELSVHLQPITRSTLKVELTITPDFQWDEKVHGSSEAFWILVEDVDSEVILHHEYFLLKAKYAQDEHLITFFVPVFEPLPPQYFIRVVSDRWLSCETQLPVSFRHLILPEKYPPPTELLDLQPLPVSALRNSAFESLYQDKFPFFNPIQTQVFNTVYNSDDNVFVGAPTGSGKTICAEFAILRMLLQSSEGRCVYITPMEALAEQVYMDWYEKFQDRLNKKVVLLTGETSTDLKLLGKGNIIISTPEKWDILSRRWKQRKNVQNINLFVVDEVHLIGGENGPVLEVICSRMRYISSQIERPIRIVALSSSLSNAKDVAHWLGCSATSTFNFHPNVRPVPLELHIQGFNISHTQTRLLSMAKPVYHAITKHSPKKPVIVFVPSRKQTRLTAIDILTTCAADIQRQRFLHCTEKDLIPYLEKLSDSTLKETLLNGVGYLHEGLSPMERRLVEQLFSSGAIQVVVASRSLCWGMNVAAHLVIIMDTQYYNGKIHAYVDYPIYDVLQMVGHANRPLQDDEGRCVIMCQGSKKDFFKKFLYEPLPVESHLDHCMHDHFNAEIVTKTIENKQDAVDYLTWTFLYRRMTQNPNYYNLQGISHRHLSDHLSELVEQTLSDLEQSKCISIEDEMDVAPLNLGMIAAYYYINYTTIELFSMSLNAKTKVRGLIEIISNAAEYENIPIRHHEDNLLRQLAQKVPHKLNNPKFNDPHVKTNLLLQAHLSRMQLSAELQSDTEEILSKAIRLIQACVDVLSSNGWLSPALAAMELAQMVTQAMWSKDSYLKQLPHFTSEHIKRCTDKGVESVFDIMEMEDEERNALLQLTDSQIADVARFCNRYPNIELSYEVVDKDSIRSGGPVVVLVQLEREEEVTGPVIAPLFPQKREEGWWVVIGDAKSNSLISIKRLTLQQKAKVKLDFVAPATGAHNYTLYFMSDAYMGCDQEYKFSVDVKEAETDSDSD

SEQ ID NO: 62 - protein, 775 aa, Homo sapiens
MAPVGGGGRPVGGPARGRLLLAAPVLLVLLWALGARGQGSPQQGTIVGMRLASCNKSCGTNPDGIIFVSEGSTVNLRLYGYSLGNISSNLISFTEVDDAETLHKSTSCLELTKDLVVQQLVNVSRGNTSGVLVVLTKFLRRSESMKLYALCTRAQPDGPWLKWTDKDSLLFMVEEPGRFLPLWLHILLITVLLVLSGIFSGLNLGLMALDPMELRIVQNCGTEKERRYARKIEPIRRKGNYLLCSLLLGNVLVNTSLTILLDNLIGSGLMAVASSTIGIVIFGEILPQALCSRHGLAVGANTILLTKFFMLLTFPLSFPISKLLDFFLGQEIRTVYNREKLMEMLKVTEPYNDLVKEELNMIQGALELRTKTVEDIMTQLQDCFMIRSDAILDFNTMSEIMESGYTRIPVFEDEQSNIVDILYVKDLAFVDPDDCTPLKTITRFYNHPVHFVFHDTKLDAMLEEFKKGKSHLAIVQKVNNEGEGDPFYEVLGLVTLEDVIEEIIKSEILDESDMYTDNRSRKRVSEKNKRDFSAFKDADNELKVKISPQLLLAAHRFLATEVSQFSPSLISEKILLRLLKYPDVIQELKFDEHNKYYARHYLYTRNKPADYFILILQGKVEVEAGKENMKFETGAFSYYGTMALTSVPSDRSPAHPTPLSRSASLSYPDRTDVSTAATLAGSSNQFGSSVLGQYISDFSVRALVDLQYIKITRQQYQNGLLASRMENSPQFPIDGCTTHMENLAEKSELPVVDETTTLLNERNSLLHKASHENAI

SEQ ID NO: 63 - protein, 694 aa, Homo sapiens
MAKINTQYSHPSRTHLKVKTSDRDLNRAENGLSRAHSSSEETSSVLQPGIAMETRGLADSGQGSFTGQGIARLSRLIFLLRRWAARHVHHQDQGPDSFPDRFRGAELKEVSSQESNAQANVGSQEPADRGRSAWPLAKCNTNTSNNTEEEKKTKKKDAIVVDPSSNLYYRWLTAIALPVFYNWYLLICRACFDELQSEYLMLWLVLDYSADVLYVLDVLVRARTGFLEQGLMVSDTNRLWQHYKTTTQFKLDVLSLVPTDLAYLKVGTNYPEVRFNRLLKFSRLFEFFDRTETRTNYPNMFRIGNLVLYILIIIHWNACIYFAISKFIGFGTDSWVYPNISIPEHGRLSRKYIYSLYWSTLTLTTIGETPPPVKDEEYLFVVVDFLVGVLIFATIVGNVGSMISNMNASRAEFQAKIDSIKQYMQFRKVTKDLETRVIRWFDYLWANKKTVDEKEVLKSLPDKLKAEIAINVHLDTLKKVRIFQDCEAGLLVELVLKLRPTVFSPGDYICKKGDIGKEMYIINEGKLAVVADDGVTQFVVLSDGSYFGEISILNIKGSKSGNRRTANIRSIGYSDLFCLSKDDLMEALTEYPEAKKALEEKGRQILMKDNLIDEELARAGADPKDLEEKVEQLGSSLDTLQTRFARLLAEYNATQMKMKQRLSQLESQVKGGGDKPLADGEVPGDATKTEDKQQ

SEQ ID NO: 64 - protein, 732 aa, Homo sapiens
MLARRQRDPLQALRRRNQELKQQVDSLLSESQLKEALEPNKRQHIYQRCIQLKQAIDENKNALQKLSKADESAPVANYNQRKEEEHTLLDKLTQQLQGLAVTISRENITEVGAPTEEEEESESEDSEDSGGEEEDAEEEEEEKEENESHKWSTGEEYIAVGDFTAQQVGDLTFKKGEILLVIEKKPDGWWIAKDAKGNEGLVPRTYLEPYSEEEEGQESSEEGSEEDVEAVDETADGAEVKQRTDPHWSAVQKAISEAGIFCLVNHVSFCYLIVLMRNRMETVEDTNGSETGFRAWNVQSRGRIFLVSKPVLQINTVDVLTTMGAIPAGFRPSTLSQLLEEGNQFRANYFLQPELMPSQLAFRDLMWDATEGTIRSRPSRISLILTLWSCKMIPLPGMSIQVLSRHVRLCLFDGNKVLSNIHTVRATWQPKKPKTWTFSPQVTRILPCLLDGDCFIRSNSASPDLGILFELGISYIRNSTGERGELSCGWVFLKLFDASGVPIPAKTYELFLNGGTPYEKGIEVDPSISRRAHGSVFYQIMTMRRQPQLLVKLRSLNRRSRNVLSLLPETLIGNMCSIHLLIFYRQILGDVLLKDRMSLQSTDLISHPMLATFPMLLEQPDVMDALRSSWAGKESTLKRSEKRDKEFLKSTFLLVYHDCVLPLLHSTRLPPFRWAEEETETARWKVITDFLKQNQENQGALQALLSPDGVHEPFDLSEQTYDFLGEMRKNAV

SEQ ID NO: 65 - protein, 999 aa, Homo sapiens
MGPAPLPLLLGLFLPALWRRAITEAREEAKPYPLFPGPFPGSLQTDHTPLLSLPHASGYQPALMFSPTQPGRPHTGNVAIPQVTSVESKPLPPLAFKHTVGHIILSEHKGVKFNCSISVPNIYQDTTISWWKDGKELLGAHHAITQFYPDDEVTAIIASFSITSVQRSDNGSYICKMKINNEEIVSDPIYIEVQGLPHFTKQPESMNVTRNTAFNLTCQAVGPPEPVNIFWVQNSSRVNEQPEKSPSVLTVPGLTEMAVFSCEAHNDKGLTVSKGVQINIKAIPSPPTEVSIRNSTAHSILISWVPGFDGYSPFRNCSIQVKEADPLSNGSVMIFNTSALPHLYQIKQLQALANYSIGVSCMNEIGWSAVSPWILASTTEGAPSVAPLNVTVFLNESSDNVDIRWMKPPTKQQDGELVGYRISHVWQSAGISKELLEEVGQNGSRARISVQVHNATCTVRIAAVTRGGVGPFSDPVKIFIPAHGWVDYAPSSTPAPGNADPVLIIFGCFCGFILIGLILYISLAIRKRVQETKFGNAFTEEDSELVVNYIAKKSFCRRAIELTLHSLGVSEELQNKLEDVVIDRNLLILGKILGEGEFGSVMEGNLKQEDGTSLKVAVKTMKLDNSSQREIEEFLSEAACMKDFSHPNVIRLLGVCIEMSSQGIPKPMVILPFMKYGDLHTYLLYSRLETGPKHIPLQTLLKFMVDIALGMEYLSNRNFLHRDLAARNCMLRDDMTVCVADFGLSKKIYSGDYYRQGRIAKMPVKWIAIESLADRVYTSKSDVWAFGVTMWEIATRGMTPYPGVQNHEMYDYLLHGHRLKQPEDCLDELYEIMYSCWRTDPLDRPTFSVLRLQLEKLLESLPDVRNQADVIYVNTQLLESSEGLAQGSTLAPLDLNIDPDSIIASCTPRAAISVVTAEVHDSKPHEGRYILNGGSEEWEDLTSAPSAAVTAEKNSVLPGERLVRNGVSWSHSSMLPLGSSLPDELLFADDSSEGSEVLM

SEQ ID NO: 66 - protein, 341 aa, Homo sapiens
MSVLDALWEDRDVRFDLSAQQMKTRPGEVLIDCLDSIEDTKGNNGDRGRLLVTNLRILWHSLALSRVNVSVGYNCILNITTRTANSKLRGQTEALYILTKCNSTRFEFIFTNLVPGSPRLFTSVMAVHRAYETSKMYRDFKLRSALIQNKQLRLLPQEHVYDKINGVWNLSSDQGNLGTFFITNVRIVWHANMNDSFNVSIPYLQIRSIKIRDSKFGLALVIESSQQSGGYVLGFKIDPVEKLQESVKEINSLHKVYSASPIFGVDYEMEEKPQPLEALTVEQIQDDVEIDSDGHTDAFVAYFADGNKQQDREPVFSEELGLAIEKLKDGFTLQGLWEVMS

SEQ ID NO: 67 - protein, 558 aa, Homo sapiens
MPWRRRRNRVSALEGGREEEAPPEAAAVPPALLTSPQQTEAAAERILLRGIFEIGRDSCDVVLSERALRWRPIQPERPAGDSKYDLLCKEEFIELKDIFSVKLKRRCSVKQQRSGTLLGITLFICLKKEQNKLKNSTLDLINLSEDHCDIWFRQFKKILAGFPNRPKSLKILLNPQSHKKEATQVYYEKVEPLLKLAGIKTDVTIMEYEGHALSLLKECELQGFDGGHRKPLFAIHWSVQRLFTGMQTLEPSVVCVGGDGSASEVAHALLLRAQKNAGMETDRILTPVRAQLPLGLIPAGSTNVLAHSLHGVPHVITATLHIIMGHVQLVDVCTFSTAGKLLRFGFSAMFGFGGRTLALAEKYRWMSPNQRRDFAVVKALAKLKAEDCEISFLPFNSSDDVQERRAQGSPKSDCNDQWQMIQGQFLNVSIMAIPCLCSVAPRGLAPNTRLNNGSMALIIARNTSRPEFIKHLKRYASVKNQFNFPFVETYTVEEVKVHPRNNTGGYNPEEEEDETASENCFPWNVDGDLMEVASEVHIRLHPRLISLYGGSMEEMIPK

SEQ ID NO: 68 - protein, 356 aa, Homo sapiens
MTKSYSESGLMGEPQPQGPPSWTDECLSSQDEEHEADKKEDDLETMNAEEDSLRNGGEEEDEDEDLEEEEEEEEEDDDQKPKRRGPKKKKMTKARLERFKLRRMKANARERNRMHGLNAALDNLRKVVPCYSKTQKLSKIETLRLAKNYIWALSEILRSGKSPDLVSFVQTLCKGLSQPTTNLVAGCLQLNPRTFLPEQNQDMPPHLPTASASFPVHPYSYQSPGLPSPPYGTMDSSHVFHVKPPPHAYSAALEPFFESPLTDCTSPSFDGPLSPPLSINGNFSFKHEPSAEFEKNYAFTMHYPAATLAGAQSHGSIFSGTAAPRCEIPIDNIMSFDSHSHHERVMSAQLNAIFHD

SEQ ID NO: 69 - protein, 408 aa, Homo sapiens
MRTDSGARLEEGHLRPPRALPPVPSQDDIPLSRPKKKKPRTKNTPASASLEGLAQTAGRRPSEGNEPSTKELKEHPEAPVQRRQKKTRLPLELETSSTQKKSSSSSLLRNENGIDAEPAEEAVIQKPRRKTKKTQPAELQYANELGVEDEDIITDEQTTVEQQSVFTAPTGISQPVGKVFVEKSRRFQAADRSELIKTTENIDVSMDVKPSWTTRDVALTVHRAFRMIGLFSHGFLAGCAVWNIVVIYVLAGDQLSNLSNLLQQYKTLAYPFQSLLYLLLALSTISAFDRIDFAKISVAIRNFLALDPTALASFLYFTALILSLSQQMTSDRIHLYTPSSVNGSLWEAGIEEQILQPWIVVNLVVALLVGLSWLFLSYRPGMDLSEELMFSSEVEEYPDKEKEIKASS

SEQ ID NO: 70 - protein, 360 aa, Homo sapiens
MDSSNCKVIAPLLSQRYRRMVTKDGHSTLQMDGAQRGLAYLRDAWGILMDMRWRWMMLVFSASFVVHWLVFAVLWYVLAEMNGDLELDHDAPPENHTICVKYITSFTAAFSFSLETQLTIGYGTMFPSGDCPSAIALLAIQMLLGLMLEAFITGAFVAKIARPKNRAFSIRFTDTAVVAHMDGKPNLIFQVANTRPSPLTSVRVSAVLYQERENGKLYQTSVDFHLDGISSDECPFFIFPLTYYHSITPSSPLATLLQHENPSHFELVVFLSAMQEGTGEICQRRTSYLPSEIMLHHCFASLLTRGSKGEYQIKMENFDKTVPEFPTPLVSKSPNRTDLDIHINGQSIDNFQISETGLTE

SEQ ID NO: 71 - protein, 405 aa, Homo sapiens
MAASGKTSKSEPNHVIFKKISRDKSVTIYLGNRDYIDHVSQVQPVDGVVLVDPDLVKGKKVYVTLTCAFRYGQEDIDVIGLTFRRDLYFSRVQVYPPVGAASTPTKLQESLLKKLGSNTYPFLLTFPDYLPCSVMLQPAPQDSGKSCGVDFEVKAFATDSTDAEEDKIPKKSSVRLLIRKVQHAPLEMGPQPRAEAAWQFFMSDKPLHLAVSLNKEIYFHGEPIPVTVTVTNNTEKTVKKIKAFVEQVANVVLYSSDYYVKPVAMEEAQEKVPPNSTLTKTLTLLPLLANNRERRGIALDGKIKHEDTNLASSTIIKEGIDRTVLGILVSYQIKVKLTVSGFLGELTSSEVATEVPFRLMHPQPEDPAKESYQDANLVFEEFARHNLKDAGEAEEGKRDKNDVDE

SEQ ID NO: 72 - protein, 211 aa, Homo sapiens
MISRMEKMTMMMKILIMFALGMNYWSCSGFPVYDYDPSSLRDALSASVVKVNSQSLSPYLFRAFRSSLKRVEVLDENNLVMNLEFSIRETTCRKDSGEDPATCAFQRDYYVSTAVCRSTVKVSAQQVQGVHARCSWSSSTSESYSSEEMIFGDMLGSHKWRNNYLFGLISDESISEQFYDRSLGIMRRVLPPGNRRYPNHRHRARINTDFE

SEQ ID NO: 73 - protein, 434 aa, Homo sapiens
MLRCLYHWHRPVLNRRWSRLCLPKQYLFTMKLQSPEFQSLFTEGLKSLTELFVKENHELRIAGGAVRDLLNGVKPQDIDFATTATPTQMKEMFQSAGIRMINNRGEKHGTITARLHEENFEITTLRIDVTTDGRHAEVEFTTDWQKDAERRDLTINSMFLGFDGTLFDYFNGYEDLKNKKVRFVGHAKQRIQEDYLRILRYFRFYGRIVDKPGDHDPETLEAIAENAKGLAGISGERIWVELKKILVGNHVNHLIHLIYDLDVAPYIGLPANASLEEFDKVSKNVDGFSPKPVTLLASLFKVQDDVTKLDLRLKIAKEEKNLGLFIVKNRKDLIKATDSSDPLKPYQDFIIDSREPDATTRVCELLKYQGEHCLLKEMQQWSIPPFPVSGHDIRKVGISSGKEIGALLQQLREQWKKSGYQMEKDELLSYIKKT

SEQ ID NO: 74 - protein, 1214 aa, Homo sapiens
MERFRLEKKLPGPDEEAVVDLGKTSSTVNTKFEKEELESHRAVYIGVHVPFSKESRRRHRHRGHKHHHRRRKDKESDKEDGRESPSYDTPSQRVQFILGTEDDDEEHIPHDLFTEMDELCYRDGEEYEWKETARWLKFEEDVEDGGDRWSKPYVATLSLHSLFELRSCILNGTVMLDMRASTLDEIADMVLDNMIASGQLDESIRENVREALLKRHHHQNEKRFTSRIPLVRSFADIGKKHSDPHLLERNGEGLSASRHSLRTGLSASNLSLRGESPLSLLLGHLLPSSRAGTPAGSRCTTPVPTPQNSPPSSPSISRLTSRSSQESQRQAPELLVSPASDDIPTVVIHPPEEDLEAALKGEEQKNEENVDLTPGILASPQSAPGNLDNSKSGEIKGNGSGGSRENSTVDFSKVDMNFMRKIPTGAEASNVLVGEVDFLERPIIAFVRLAPAVLLTGLTEVPVPTRFLFLLLGPAGKAPQYHEIGRSIATLMTDEIFHDVAYKAKDRNDLLSGIDEFLDQVTVLPPGEWDPSIRIEPPKSVPSQEKRKIPVFHNGSTPTLGETPKEAAHHAGPELQRTGRLFGGLILDIKRKAPFFLSDFKDALSLQCLASILFLYCACMSPVITFGGLLGEATEGRISAIESLFGASLTGIAYSLFAGQPLTILGSTGPVLVFEKILYKFCRDYQLSYLSLRTSIGLWTSFLCIVLVATDASSLVCYITRFTEEAFAALICIIFIYEALEKLFDLGETYAFNMHNNLDKLTSYSCVCTEPPNPSNETLAQWKKDNITAHNISWRNLTVSECKKLRGVFLGSACGHHGPYIPDVLFWCVILFFTTFFLSSFLKQFKTKRYFPTKVRSTISDFAVFLTIVIMVTIDYLVGVPSPKLHVPEKFEPTHPERGWIISPLGDNPWWTLLIAAIPALLCTILIFMDQQITAVIINRKEHKLKKGAGYHLDLLMVGVMLGVCSVMGLPWFVAATVLSISHVNSLKVESECSAPGEQPKFLGIREQRVTGLMIFILMGLSVFMTSVLKFIPMPVLYGVFLYMGVSSLKGIQLFDRIKLFGMPAKHQPDLIYLRYVPLWKVHIFTVIQLTCLVLLWVIKVSAAAVVFPMMVLALVFVRKLMDLCFTKRELSWLDDLMPESKKKKEDDKKKKEKEEAERMLQDDDDTVHLPFEGGSLLQIPVKALKYSPDKPVSVKISFEDEPRKKYVDAETSL

SEQ ID NO: 75 - protein, 299 aa, Homo sapiens
MAELGLNEHHQNEVINYMRFARSKRGLRLKTVDSCFQDLKESRLVEDTFTIDEVSEVLNGLQAVVHSEVESELINTAYTNVLLLRQLFAQAEKWYLKLQTDISELENRELLEQVAEFEKAEITSSNKKPILDVTKPKLAPLNEGGTAELLNKEILRLQEENEKLKSRLKTIEIQATNALDEKSKLEKALQDLQLDQGNQKDFIKAQDLSNLENTVAALKSEFQKTLNDKTENQKSLEENLATAKHDLLRVQEQLHMAEKELEKKFQQTAAYRNMKEILTKKNDQIKDLRKRLAQYEPED

SEQ ID NO: 76 - protein, 350 aa, Homo sapiens
MGAGASAEEKHSRELEKKLKEDAEKDARTVKLLLLGAGESGKSTIVKQMKIIHQDGYSLEECLEFIAIIYGNTLQSILAIVRAMTTLNIQYGDSARQDDARKLMHMADTIEEGTMPKEMSDIIQRLWKDSGIQACFERASEYQLNDSAGYYLSDLERLVTPGYVPTEQDVLRSRVKTTGIIETQFSFKDLNFRMFDVGGQRSERKKWIHCFEGVTCIIFIAALSAYDMVLVEDDEVNRMHESLHLFNSICNHRYFATTSIVLFLNKKDVFFEKIKKAHLSICFPDYDGPNTYEDAGNYIKVQFLELNMRRDVKEIYSHMTCATDTQNVKFVFDAVTDIIIKENLKDCGLF

SEQ ID NO: 77 - protein, 314 aa, Homo sapiens
MGSQALPPGPMQTLIFFDMEATGLPFSQPKVTELCLLAVHRCALESPPTSQGPPPTVPPPPRVVDKLSLCVAPGKACSPAASEITGLSTAVLAAHGRQCFDDNLANLLLAFLRRQPQPWCLVAHNGDRYDFPLLQAELAMLGLTSALDGAFCVDSITALKALERASSPSEHGPRKSYSLGSIYTRLYGQSPPDSHTAEGDVLALLSICQWRPQALLRWVDAHARPFGTIRPMYGVTASARTKPRPSAVTTTAHLATTRNTSPSLGESRGTKDLPPVKDPGALSREGLLAPLGLLAILTLAVATLYGLSLATPGE

SEQ ID NO: 78 - protein, 382 aa, Homo sapiens
MDGETAEEQGGPVPPPVAPGGPGLGGAPGGRREPKKYAVTDDYQLSKQVLGLGVNGKVLECFHRRTGQKCALKLLYDSPKARQEVDHHWQASGGPHIVCILDVYENMHHGKRCLLIIMECMEGGELFSRIQERGDQAFTEREAAEIMRDIGTAIQFLHSHNIAHRDVKPENLLYTSKEKDAVLKLTDFGFAKETTQNALQTPCYTPYYVAPEVLGPEKYDKSCDMWSLGVIMYILLCGFPPFYSNTGQAISPGMKRRIRLGQYGFPNPEWSEVSEDAKQLIRLLLKTDPTERLTITQFMNHPWINQSMVVPQTPLHTARVLQEDKDHWDEVKEEMTSALATMRVDYDQVKIKDLKTSNNRLLNKRRKKQAGSSSASQGCNNQ

SEQ ID NO: 79 - protein, 892 aa, Homo sapiens
MSERAADDVRGEPRRAAAAAGGAAAAAARQQQQQQQQQQPPPPQPQRQQHPPPPPRRTRPEDGGPGAASTSAAAMATVGERRPLPSPEVMLGQSWNLWVEASKLPGKDGTELDESFKEFGKNREVMGLCREDMPIFGFCPAHDDFYLVVCNDCNQVVKPQAFQSHYERRHSSSSKPPLAVPPTSVFSFFPSLSKSKGGSASGSNRSSSGGVLSASSSSSKLLKSPKEKLQLRGNTRPMHPIQQSRVPHGRIMTPSVKVEKIHPKMDGTLLKSAVGPTCPATVSSLVKPGLNCPSIPKPTLPSPGQILNGKGLPAPPTLEKKPEDNSNNRKFLNKRLSEREFDPDIHCGVIDLDTKKPCTRSLTCKTHSLTQRRAVQGRRKRFDVLLAEHKNKTREKELIRHPDSQQPPQPLRDPHPAPPRTSQEPHQNPHGVIPSESKPFVASKPKPHTPSLPRPPGCPAQQGGSAPIDPPPVHESPHPPLPATEPASRLSSEEGEGDDKEESVEKLDCHYSGHHPQPASFCTFGSRQIGRGYYVFDSRWNRLRCALNLMVEKHLNAQLWKKIPPVPSTTSPISTRIPHRTNSVPTSQCGVSYLAAATVSTSPVLLSSTCISPNSKSVPAHGTTLNAQPAASGAMDPVCSMQSRQVSSSSSSPSTPSGLSSVPSSPMSRKPQKLKSSKSLRPKESSGNSTNCQNASSSTSGGSGKKRKNSSPLLVHSSSSSSSSSSSSHSMESFRKNCVAHSGPPYPSTVTSSHSIGLNCVTNKANAVNVRHDQSGRGPPTGSPAESIKRMSVMVNSSDSTLSLGPFIHQSNELPVNSHGSFSHSHTPLDKLIGKKRKCSPSSSSINNSSSKPTKVAKVPAVNNVHMKHTGTIPGAQGLMNSSLLHQPKARP

SEQ ID NO: 80 - protein, 676 aa, Homo sapiens
MRVLGGRCGALLACLLLVLPVSEANFLSKQQASQVLVRKRRANSLLEETKQGNLERECIEELCNKEEAREVFENDPETDYFYPKYLVCLRSFQTGLFTAARQSTNAYPDLRSCVNAIPDQCSPLPCNEDGYMSCKDGKASFTCTCKPGWQGEKCEFDINECKDPSNINGGCSQICDNTPGSYHCSCKNGFVMLSNKKDCKDVDECSLKPSICGTAVCKNIPGDFECECPEGYRYNLKSKSCEDIDECSENMCAQLCVNYPGGYTCYCDGKKGFKLAQDQKSCEVVSVCLPLNLDTKYELLYLAEQFAGVVLYLKFRLPEISRFSAEFDFRTYDSEGVILYAESIDHSAWLLIALRGGKIEVQLKNEHTSKITTGGDVINNGLWNMVSVEELEHSISIKIAKEAVMDINKPGPLFKPENGLLETKVYFAGFPRKVESELIKPINPRLDGCIRSWNLMKQGASGIKEIIQEKQNKHCLVTVEKGSYYPGSGIAQFHIDYNNVSSAEGWHVNVTLNIRPSTGTGVMLALVSGNNTVPFAVSLVDSTSEKSQDILLSVENTVIYRIQALSLCSDQQSHLEFRVNRNNLELSTPLKIETISHEDLQRQLAVLDKAMKAKVATYLGGLPDVPFSATPVNAFYNGCMEVNINGVQLDLDEAISKHNDIRAHSCPSVWKKTKNS

SEQ ID NO: 81 - protein, 186 aa, Homo sapiens
MGLLDRLSVLLGLKKKEVHVLCLGLDNSGKTTIINKLKPSNAQSQNILPTIGFSIEKFKSSSLSFTVFDMSGQGRYRNLWEHYYKEGQAIIFVIDSSDRLRMVVAKEELDTLLNHPDIKHRRIPILFFANKMDLRDAVTSVKVSQLLCLENIKDKPWHICASDAIKGEGLQEGVDWLQDQIQTVKT

SEQ ID NO: 82 - protein, 1241 aa, Homo sapiens
MIMFPLFGKISLGILIFVLIEGDFPSLTAQTYLSIEEIQEPKSAVSFLLPEESTDLSLATKKKQPLDRRETERQWLIRRRRSILFPNGVKICPDESVAEAVANHVKYFKVRVCQEAVWEAFRTFWDRLPGREEYHYWMNLCEDGVTSIFEMGTNFSESVEHRSLIMKKLTYAKETVSSSELSSPVPVGDTSTLGDTTLSVPHPEVDAYEGASESSLERPEESISNEIENVIEEATKPAGEQIAEFSIHLLGKQYREELQDSSSFHHQHLEEEFISEVENAFTGLPGYKEIRVLEFRSPKENDSGVDVYYAVTFNGEAISNTTWDLISLHSNKVENHGLVELDDKPTVVYTISNFRDYIAETLQQNFLLGNSSLNPDPDSLQLINVRGVLRHQTEDLVWNTQSSSLQATPSSILDNTFQAAWPSADESITSSIPPLDFSSGPPSATGRELWSESPLGDLVSTHKLAFPSKMGLSSSPEVLEVSSLTLHSVTPAVLQTGLPVASEERTSGSHLVEDGLANVEESEDFLSIDSLPSSSFTQPVPKETIPSMEDSDVSLTSSPYLTSSIPFGLDSLTSKVKDQLKVSPFLPDASMEKELIFDGGLGSGSGQKVDLITWPWSETSSEKSAEPLSKPWLEDDDSLLPAEIEDKKLVLVDKMDSTDQISKHSKYEHDDRSTHFPEEEPLSGPAVPIFADTAAESASLTLPKHISEVPGVDDYSVTKAPLILTSVAISASTDKSDQADAILREDMEQITESSNYEWFDSEVSMVKPDMQTLWTILPESERVWTRTSSLEKLSRDILASTPQSADRLWLSVTQSTKLPPTTISTLLEDEVIMGVQDISLELDRIGTDYYQPEQVQEQNGKVGSYVEMSTSVHSTEMVSVAWPTEGGDDLSYTQTSGALVVFFSLRVTNMMFSEDLFNKNSLEYKALEQRFLELLVPYLQSNLTGFQNLEILNFRNGSIVVNSRMKFANSVPPNVNNAVYMILEDFCTTAYNTMNLAIDKYSLDVESGDEANPCKFQACNEFSECLVNPWSGEAKCRCFPGYLSVEERPCQSLCDLQPDFCLNDGKCDIMPGHGAICRCRVGENWWYRGKHCEEFVSEPVIIGITIASVVGLLVIFSAIIYFFIRTLQAHHDRSERESPFSGSSRQPDSLSSIENAVKYNPVYESHRAGCEKYEGPYPQHPFYSSASGDVIGGLSREEIRQMYESSELSREEIQERMRVLELYANDPEFAAFVREQQVEEV

SEQ ID NO: 83 - protein, 598 aa, Homo sapiens
MKPTGTDPRILSIAAEVAKSPEQNVPVILLKLKEIINITPLGSSELKKIKQDIYCYDLIQYCLLVLSQDYSRIQGGWTTISQLTQILSHCCVGLEPGEDAEEFYNELLPSAAENFLVLGRQLQTCFINAAKAEEKDELLHFFQIVTDSLFWLLGGHVELIQNVLQSDHFLHLLQADNVQIGSAVMMMLQNILQINSGDLLRIGRKALYSILDEVIFKLFSTPSPVIRSTATKLLLLMAESHQEILILLRQSTCYKGLRRLLSKQETGTEFSQELRQLVGLLSPMVYQEVEEQKLHQAACLIQAYWKGFQTRKRLKKLPSAVIALQRSFRSKRSKMLLEINRQKEEEDLKLQLQLQRQRAMRLSRELQLSMLEIVHPGQVEKHYREMEEKSALIIQKHWRGYRERKNFHQQRQSLIEYKAAVTLQRAALKFLAKCRKKKKLFAPWRGLQELTDARRVELKKRVDDYVRRHLGSPMSDVVSRELHAQAQERLQHYFMGRALEERAQQHREALIAQISTNVEQLMKAPSLKEAEGKEPELFLSRSRPVAAKAKQAHLTTLKHIQAPWWKKLGEESGDEIDVPKDELSIELENLFIGGTKPP

SEQ ID NO: 84 - protein, 348 aa, Homo sapiens [sequence omitted]

SEQ ID NO: 85 - protein, 1330 aa, Homo sapiens
MGTASSLVSPAGGEVIEDTYGAGGGEACEIPVEVKPKARLLRNSFRRGAGAAAGAGPGSLPRGVGAGGLLGASFKSTGSSVPELEYAAAEYERLRKEYEIFRVSKNQELLSMGRREAKLDTENKRLRAELQALQKTYQKILREKESALEAKYQAMERAATFEHDRDKVKRQFKIFRETKENEIQDLLRAKRELESKLQRLQAQGIQVFDPGESDSDDNCTDVTAAGTQCEYWTGGALGSEPSIGSMIQLQQSFRGPEFAHSSIDVEGPFANVNRDDWDIAVASLLQVTPLFSHSLWSNTVRCYLIYTDETQPEMDLFLKDYSPKLKRMCETMGYFFHAVYFPIDVENQYLTVRKWEIEKSSLVILFIHLTLPSLLLEDCEEAFLKNPEGKPRLIFHRLEDGKVSSDSVQQLIDQVSNLNKTSKAKIIDHSGDPAEGVYKTYICVEKIIKQDILGFENTDLETKDLGSEDSIPEEDDFGDVLWDIHDEQEQMETFQQASNSAHELGFEKYYQRLNDLVAAPAPIPPLLVSGGPGSGKSLLLSKWIQLQQKNSPNTLILSHFVGRPMSTSSESSLIIKRLTLKLMQHSWSVSALTLDPAKLLEEFPRWLEKLSARHQGSIIIVIDSIDQVQQVEKHMKWLIDPLPVNVRVIVSVNVETCPPAWRLWPTLHLDPLSPKDAKSIIIAECHSVDIKLSKEQEKKLERHCRSATTCNALYVTLFGKMIARAGRAGNLDKILHQCFQCQDTLSLYRLVLHSIRESMANDVDKELMKQILCLVNVSHNGVSESELMELYPEMSWTFLTSLIHSLYKMCLLTYGCGLLRFQHLQAWETVRLEYLEGPTVTSSYRQKLINYFTLQLSQDRVTWRSADELPWLFQQQGSKQKLHDCLLNLFVSQNLYKRGHFAELLSYWQFVGKDKSAMATEYFDSLKQYEKNCEGEDNMSCLADLYETLGRFLKDLGLLSQAIVPLQRSLEIRETALDPDHPRVAQSLHQLASVYVQWKKFGNAEQLYKQALEISENAYGADHPYTARELEALATLYQKQNKYEQAEHFRKKSFKIHQKAIKKKGNLYGFALLRRRALQLEELTLGKDTPDNARTLNELGVLYYLQNNLETADQFLKRSLEMRERVLGPDHPDCAQSLNNLAALCNEKKQYDKAEELYERALDIRRRALAPDHPSLAYTVKHLAILYKKMGKLDKAVPLYELAVEIRQKSFGPKHPSVATALVNLAVLYSQMKKHVEALPLYERALKIYEDSLGRMHPRVGETLKNLAVLSYEGGDFEKAAELYKRAMEIKEAETSLLGGKAPSRHSSSGDTFSLKTAHSPNVFLQQGQR

SEQ ID NO: 86 - protein, 232 aa, Homo sapiens
MPSQQKKIIFCMAGVFSFACALGVVTALGTPLWIKATVLCKTGALLVNASGQELDKFMGEMQYGLFHGEGVRQCGLGARPFRFSFFPDLLKAIPVSIHVNVILFSAILIVLTMVGTAFFMYNAFGKPFETLHGPLGLYLLSFISGSCGCLVMILFASEVKIHHLSEKIANYKEGTYVYKTQSEKYTTSFWVIFFCFFVHFLNGLLIRLAGFQFPFAKSKDAETTNVAADLMY

SEQ ID NO: 87 - protein, 771 aa, Homo sapiens
MSGFFTSLDPRRVQWGAAWYAMHSRILRTKPVESMLEGTGTTTAHGTKLAQVLTTVDLISLGVGSCVGTGMYVVSGLVAKEMAGPGVIVSFIIAAVASILSGVCYAEFGVRVPKTTGSAYTYSYVTVGEFVAFFIGWNLILEYLIGTAAGASALSSMFDSLANHTISRWMADSVGTLNGLGKGEESYPDLLALLIAVIVTIIVALGVKNSIGFNNVLNVLNLAVWVFIMIAGLFFINGKYWAEGQFLPHGWSGVLQGAATCFYAFIGFDIIATTGEEAKNPNTSIPYAITASLVICLTAYVSVSVILTLMVPYYTIDTESPLMEMFVAHGFYAAKFVVAIGSVAGLTVSLLGSLFPMPRVIYAMAGDGLLFRFLAHVSSYTETPVVACIVSGFLAALLALLVSLRDLIEMMSIGTLLAYTLVSVCVLLLRYQPESDIDGFVKFLSEEHTKKKEGILADCEKEACSPVSEGDEFSGPATNTCGAKNLPSLGDNEMLIGKSDKSTYNVNHPNYGTVDMTTGIEADESENIYLIKLKKLIGPHYYTMRIRLGLPGKMDRPTAATGHTVTICVLLLFILMFIFCSFIIFGSDYISEQSWWAILLVVLMVLLISTLVFVILQQPENPKKLPYMAPCLPFVPAFAMLVNIYLMLKLSTITWIRFAVWCFVGLLIYFGYGIWNSTLEISAREEALHQSTYQRYDVDDPFSVEEGFSYATEGESQEDWGGPTEDKGFYYQQMSDAKANGRTSSKAKSKSKHKQNSEALIANDELDYSPE

SEQ ID NO: 88 - protein, 367 aa, Homo sapiens
MDAQCSAKVNARKRRKEAPGPNGATEEDGVPSKVQRCAVGLRQPAPFSDEIEVDFSKPYVRVTMEEASRGTPCERPVRVYADGIFDLFHSGHARALMQAKNLFPNTYLIVGVCSDELTHNFKGFTVMNENERYDAVQHCRYVDEVVRNAPWTLTPEFLAEHRIDFVAHDDIPYSSAGSDDVYKHIKEAGMFAPTQRTEGISTSDIITRIVRDYDVYARRNLQRGYTAKELNVSFINEKKYHLQERVDKVKKKVKDVEEKSKEFVQKVEEKSIDLIQKWEEKSREFIGSFLEMFGPEGALKHMLKEGKGRMLQAISPKQSPSSSPTRERSPSPSFRWPFSGKTSPPCSPANLSRHKAAAYDISEDEED

SEQ ID NO: 89 - protein, 163 aa, Homo sapiens
MMCTAKKCGIRFQPPAIILIYESEIKGKIRQRIMPVRNFSKFSDCTRAAEQLKNNPRHKSYLEQVSLRQLEKLFSFLRGYLSGQSLAETMEQIQRETTIDPEEDLNKLDDKELAKRKSIMDELFEKNQKKKDDPNFVYDIEVEFPQDDQLQSCGWDTESADEF

SEQ ID NO: 90 - protein, 854 aa, Homo sapiens
MSLSEEQARSFLDQNPDFARQYFGKKLSPENVAAACEDGCPPDCDSLRDLCQVEESTALLELVQDMQESINMERVVFKVLRRLCTLLQADRCSLFMYRQRNGVAELATRLFSVQPDSVLEDCLVPPDSEIVFPLDIGVVGHVAQTKKMVNVEDVAECPHFSSFADELTDYKTKNMLATPIMNGKDVVAVIMAVNKLNGPFFTSEDEDVFLKYLNFATLYLKIYHLSYLHNCETRRGQVLLWSANKVFEELTDIERQFHKAFYTVRAYLNCERYSVGLLDMTKEKEFFDVWSVLMGESQPYSGPRTPDGREIVFYKVIDYVLHGKEEIKVIPTPSADHWALASGLPSYVAESGFICNIMNASADEMFKFQEGALDDSGWLIKNVLSMPIVNKKEEIVGVATFYNRKDGKPFDEQDEVLMESLTQFLGWSVMNTDTYDKMNKLENRKDIAQDMVLYHVKCDRDEIQLILPTRARLGKEPADCDEDELGEILKEELPGPTTFDIYEFHFSDLECTELDLVKCGIQMYYELGVVRKFQIPQEVLVRFLFSISKGYRRITYHNWRHGFNVAQTMFTLLMTGKLKSYYTDLEAFAMVTAGLCHDIDHRGTNNLYQMKSQNPLAKLHGSSILERHHLEFGKFLLSEETLNIYQNLNRRQHEHVIHLMDIAIIATDLALYFKKRAMFQKIVDESKNYQDKKSWVEYLSLETTRKEIVMAMMMTACDLSAITKPWEVQSKVALLVAAEFWEQGDLERTVLDQQPIPMMDRNKAAELPKLQVGFIDFVCTFVYKEFSRFHEEILPMFDRLQNNRKEWKALADEYEAKVKALEEKEEEERVAAKKVGTEICNGGPAPKSSTCCIL

SEQ ID NO: 91 - protein, 890 aa, Homo sapiens
MDSNTAPLGPSCPQPPPAPQPQARSRLNATASLEQERSERPRAPGPQAGPGPGVRDAAAPAEPQAQHTRSRERADGTGPTKGDMEIPFEEVLERAKAGDPKAQTEVGKHYLQLAGDTDEELNSCTAVDWLVLAAKQGRREAVKLLRRCLADRRGITSENEREVRQLSSETDLERAVRKAALVMYWKLNPKKKKQVAVAELLENVGQVNEHDGGAQPGPVPKSLQKQRRMLERLVSSESKNYIALDDFVEITKKYAKGVIPSSLFLQDDEDDDELAGKSPEDLPLRLKVVKYPLHAIMEIKEYLIDMASRAGMHWLSTIIPTHHINALIFFFIVSNLTIDFFAFFIPLVIFYLSFISMVICTLKVFQDSKAWENFRTLTDLLLRFEPNLDVEQAEVNFGWNHLEPYAHFLLSVFFVIFSFPIASKDCIPCSELAVITGFFTVTSYLSLSTHAEPYTRRALATEVTAGLLSLLPSMPLNWPYLKVLGQTFITVPVGHLVVLNVSVPCLLYVYLLYLFFRMAQLRNFKGTYCYLVPYLVCFMWCELSVVILLESTGLGLLRASIGYFLFLFALPILVAGLALVGVLQFARWFTSLELTKIAVTVAVCSVPLLLRWWTKASFSVVGMVKSLTRSSMVKLILVWLTAIVLFCWFYVYRSEGMKVYNSTLTWQQYGALCGPRAWKETNMARTQILCSHLEGHRVTWTGRFKYVRVTDIDNSAESAINMLPFFIGDWMRCLYGEAYPACSPGNTSTAEEELCRLKLLAKHPCHIKKFDRYKFEITVGMPFSSGADGSRSREEDDVTKDIVLRASSEFKSVLLSLRQGSLIEFSTILEGRLGSKWPVFELKAISCLNCMAQLSPTRRHVKIEHDWRSTVHGAVKFAFDFFFFPFLSAA

SEQ ID NO: 92 - protein, 348 aa, Homo sapiens
MPDELTEPGRATPARASSFLIENLLAAEAKGAGRATQGDGSREDEEEDDDDPEDEDAEQARRRRLQRRRQLLAGTGPGGEARARALLGPGALGLGPRPPPGPGPPFALGCGGAARWYPRAHGGYGGGLSPDTSDRDSPETGEEMGRAEGAWPRGPGPGAVQREAAELAARGPAAGTEEASELAEVPAAAGETRGGVGVGGGRKKKTRTVFSRSQVFQLESTFDLKRYLSSAERAGLAASLQLTETQVKIWFQNRRNKWKRQLAAELEAASLSPPGAQRLVRVPVLYHESPPAAAAAGPPATLPFPLAPAAPAPPPPLLGFSGALAYPLAAFPAAASVPFLRAQMPGLV

SEQ ID NO: 93 - protein, 221 aa, Homo sapiens
MSDSEEESQDRQLKIVVLGDGASGKTSLTTCFAQETFGKQYKQTIGLDFFLRRITLPGNLNVTLQIWDIGGQTIGGKMLDKYIYGAQGVLLVYDITNYQSFENLEDWYTVVKKVSEESETQPLVALVGNKIDLEHMRTIKPEKHLRFCQENGFSSHFVSAKTGDSVFLCFQKVAAEILGIKLNKAEIEQSQRVVKADIVNYNQEPMSRTVNPPRSSMCAVQ

SEQ ID NO: 94 - protein, 1620 aa, Homo sapiens
MNPREEKVKIITEEFIENDEDADMGRQNKNSKVRRQPRKKQPPTAVPKEMVSEKSHLGNPQEPVQEEPKTRLLSMTVRRGPRSLPPIPSTSRTGFAEFSMRGRMREKLQAARSKAESALLQEIPTPRPRRLRSPSKKELETEFGTEPGKEVERTQQEVDSQSYSRVKFHDSARKIKPKPQVPPGFPSAEEAYNFFTFNFDPEPEGSEEKPKARHRAGTNQEEEEGEEEEPPAQGGGKEMDEEELLNGDDAEDFLLGLDHVADDFVAVRPADYESIHDRLQMEREMLFIPSRQTVPTYKKLPENVQPRFLEDEGLYTGVRPEVARTNQNIMENRLLMQDPERRWFGDDGRILALPNPIKPFPSRPPVLTQEQSIKAELETLYKKAVKYVHSSQHVIRSGDPPGNFQLDIDISGLIFTHHPCFSREHVLAAKLAQLYDQYLARHQRNKAKFLTDKLQALRNAVQTGLDPEKPHQSLDTIQKTINEYKSEIRQTRKFRDAEQEKDRTLLKTIIKVWKEMKSLREFQRFTNTPLKLVLRKEKADQKADEEAYEAEIQAEISELLEEHTEEYAQKMEEYRTSLQQWKAWRKVQRAKKKKRKQAAEEHPGDEIAEPYPEEDLVKPSPPEPTDRAVIEQEVRERAAQSRRRPWEPTLVPELSLAGSVTPNDQCPRAEVSRREDVKKRSVYLKVLFNNKEVSRTVSRPLGADFRVHFGQIFNLQIVNWPESLTLQVYETVGHSSPTLLAEVFLPIPETTVVTGRAPTEEVEFSSNQHVTLDHEGVGSGVPFSFEADGSNQLTLMTSGKVSHSVAWAIGENGIPLIPPLSQQNIGFRSALKKADAISSIGTSGLTDMKKLAKWAAESKLDPNDPNNAPLMQLISVATSGESYVPDFFRLEQLQQEFNFVSDQELNRSKRFRLLHLRSQEVPEFRNYKQVPVYDREIMEKVFQDYEKRLRDRNVIETKEHIDTHRAIVAKYLQQVRESVINRFLIAKQYFLLADMIVEEEVPNISILGLSLFKLAEQKRPLRPRRKGRKKVTAQNLSDGDIKLLVNIVRAYDIPVRKPAVSKFQQPSRSSRMFSEKHAASPSTYSPTHNADYPLGQVLVRPFVEVSFQRTVCHTTTAEGPNPSWNEELELPFRAPNGDYSTASLQSVKDVVFINIFDEVLHDVLEDDRERGSGIHTRIERHWLGCVKMPFSTIYFQARIDGTFKIDIPPVLLGYSKERNMILERGFDSVRSLSEGSYITLFITIEPQLVPGESIREKFESQEDEKLLQATEKFQAECALKFPNRQCLTTVIDISGKTVFITRYLKPLNPPQELLNVYPNNLQATAELVARYVSLIPFLPDTVSFGGICDLWSTSDQFLDLLAGDEEEHAVLLCNYFLSLGKKAWLLMGNAIPEGPTAYVLTWEQGRYLIWNPCSGHFYGQFDTFCPLKNVGCLIGPDNIWFNIQRYESPLRINFDVTRPKLWKSFFSRSLPYPGLSSVQPEELIYQRSDKAAAAELQDRIEKILKEKIMDWRPRHLTRWNRYCTSTLRHFLPLLEKSQGEDVEDDHRAELLKQLGDYRFSGFPLHMPYSEVKPLIDAVYSTGVHNIDVPNVEFALAVYIHPYPKNVLSVWIYVASLIRNR

SEQ ID NO: 95 - protein, 865 aa, Homo sapiens
MALVLGSLLLLGLCGNSFSGGQPSSTDAPKAWNYELPATNYETQDSHKAGPIGILFELVHIFLYVVQPRDFPEDTLRKFLQKAYESKIDYDKPETVILGLKIVYYEAGIILCCVLGLLFIILMPLVGYFFCMCRCCNKCGGEMHQRQKENGPFLRKCFAISLLVICIIISIGIFYGFVANHQVRTRIKRSRKLADSNFKDLRTLLNETPEQIKYILAQYNTTKDKAFTDLNSINSVLGGGILDRLRPNIIPVLDEIKSMATAIKETKEALENMNSTLKSLHQQSTQLSSSLTSVKTSLRSSLNDPLCLVHPSSETCNSIRLSLSQLNSNPELRQLPPVDAELDNVNNVLRTDLDGLVQQGYQSLNDIPDRVQRQTTTVVAGIKRVLNSIGSDIDNVTQRLPIQDILSAFSVYVNNTESYIHRNLPTLEEYDSYWWLGGLVICSLLTLIVIFYYLGLLCGVCGYDRHATPTTRGCVSNTGGVFLMVGVGLSFLFCWILMIIVVLTFVFGANVEKLICEPYTSKELFRVLDTPYLLNEDWEYYLSGKLFNKSKMKLTFEQVYSDCKKNRGTYGTLHLQNSFNISEHLNINEHTGSISSELESLKVNLNIFLLGAAGRKNLQDFAACGIDRMNYDSYLAQTGKSPAGVNLLSFAYDLEAKANSLPPGNLRNSLKRDAQTIKTIHQQRVLPIEQSLSTLYQSVKILQRTGNGLLERVTRILASLDFAQNFITNNTSSVIIEETKKYGRTIIGYFEHYLQWIEFSISEKVASCKPVATALDTAVDVFLCSYIIDPLNLFWFGIGKATVFLLPALIFAVKLAKYYRRMDSEDVYDDVETIPMKNMENGNNGYHKDHVYGIHNPVMTSPSQH

SEQ ID NO: 96 - protein, 1321 aa, Homo sapiens
MEPPGRRRGRAQPPLLLPLSLLALLALLGGGGGGGAAALPAGCKHDGRPRGAGRAAGAAEGKVVCSSLELAQVLPPDTLPNRTVTLILSNNKISELKNGSFSGLSLLERLDLRNNLISSIDPGAFWGLSSLKRLDLTNNRIGCLNADIFRGLTNLVRLNLSGNLFSSLSQGTFDYLASLRSLEFQTEYLLCDCNILWMHRWVKEKNITVRDTRCVYPKSLQAQPVTGVKQELLTCDPPLELPSFYMTPSHRQVVFEGDSLPFQCMASYIDQDMQVLWYQDGRIVETDESQGIFVEKNMIHNCSLIASALTISNIQAGSTGNWGCHVQTKRGNNTRTVDIVVLESSAQYCPPERVVNNKGDFRWPRTLAGITAYLQCTRNTHGSGIYPGNPQDERKAWRRCDRGGFWADDDYSRCQYANDVTRVLYMFNQMPLNLTNAVATARQLLAYTVEAANFSDKMDVIFVAEMIEKFGRFTKEEKSKELGDVMVDIASNIMLADERVLWLAQREAKACSRIVQCLQRIATYRLAGGAHVYSTYSPNIALEAYVIKSTGFTGMTCTVFQKVAASDRTGLSDYGRRDPEGNLDKQLSFKCNVSNTFSSLALKNTIVEASIQLPPSLFSPKQKRELRPTDDSLYKLQLIAFRNGKLFPATGNSTNLADDGKRRTVVTPVILTKIDGVNVDTHHIPVNVTLRRIAHGADAVAARWDFDLLNGQGGWKSDGCHILYSDENITTIQCYSLSNYAVLMDLTGSELYTQAASLLHPVVYTTAIILLLCLLAVIVSYIYHHSLIRISLKSWHMLVNLCFHIFLTCVVFVGGITQTRNASICQAVGIILHYSTLATVLWVGVTARNIYKQVTKKAKRCQDPDEPPPPPRPMLRFYLIGGGIPIIVCGITAAANIKNYGSRPNAPYCWMAWEPSLGAFYGPASFITFVNCMYFLSIFIQLKRHPERKYELKEPTEEQQRLAANENGEINHQDSMSLSLISTSALENEHTFHSQLLGASLTLLLYVALWMFGALAVSLYYPLDLVFSFVFGATSLSFSAFFVVHHCVNREDVRLAWIMTCCPGRSSYSVQVNVQPPNSNGTNGEAPKCPNSSAESSCTNKSASSFKNSSQGCKLTNLQAAAAQCHANSLPLNSTPQLDNSLTEHSMDNDIKMHVAPLEVQFRTNVHSSRHHKNRSKGHRASRLTVLREYAYDVPTSVEGSVQNGLPKSRLGNNEGHSRSRRAYLAYRERQYNPPQQDSSDACSTLPKSSRNFEKPVSTTSKKDALRKPAVVELENQQKSYGLNLAIQNGPIKSNGQEGPLLGTDSTGNVRTGLWKHETTV

SEQ ID NO: 97 - protein, 781 aa, Homo sapiens
MHDECTPQQTMSSIQDTKAADIAARGELNVIETATVSPTNGEESHYTNQVQLEKNKTHMSSALVEKENNTSLNGRVLGQEESQNKMFPDNAENEDDKQIEHMTVENINGNREETHGIIQTTETEIQETSESPREEMTTSSIICDISKKYINSTLPNDSENIKHKNNIMEKEYLDVLSDVTGPQVSCYITAPSYVLQQLECRIINHMSSLIVGDNEELVSNVITIECSDKEKRVPFPIGIAIPFTARYRGNYRDIMVKVCDINLQSSYLNPNSLEGMKGGYKGTCASVKVYKLGIFSVVSCLKKESFTVTKKGLALKSSMDSRISLNYPPGVFTSPVLVQLKIQPVDPALVAHLKAQQDTFYSVQSTSPLIHIQHPSTYPFQKPVTLFLPCSPYLDKNNLGSEIDHKRRASATINRITPSYFNRTKIASIRKPRKNASECLKLLGFRSQDSGWCGLDDVVKTIQSGLVSVELYEHLERFIVLHLSSTMDNSHLVTFVKSLEEAMLSTTACIVLSHQKDNPHRIAVLVVPSKDLSQVLKDLHLEGFGGPPEPSRHFQVREGEQLLLRFTGNIFASSNGKDYGKDYTLIFHLQRKPRLELQIKEVDEFGNYSCPHYKGTIVVYKVPKGKIVPNLNQSLVINENHSQLPICKLPLKLPKHKKLINRPQSTKRVSKDPVEALWDNLLHWLAEELSEENAESLSSTLPLRRSTIQLIKLKNPDDLTEQIHEFLCFWKKSLPTFTDKLRLLARHLRKIGRSDLAEELKFKWENKVFTEPQQCFDVAPE

SEQ ID NO: 98 - protein, 1342 aa, Homo sapiens
MKRIFSLLEKTWLGAPIQFAWQKTSGNYLAVTGADYIVKIFDRHGQKRSEINLPGNCVAMDWDKDGDVLAVIAEKSSCIYLWDANTNKTSQLDNGMRDQMSFLLWSKVGSFLAVGTVKGNLLIYNHQTSRKIPVLGKHTKRITCGCWNAENLLALGGEDKMITVSNQEGDTIRQTQVRSEPSNMQFFLMKMDDRTSAAESMISVVLGKKTLFFLNLNEPDNPADLEFQQDFGNIVCYNWYGDGRIMIGFSCGHFVVISTHTGELGQEIFQARNHKDNLTSIAVSQTLNKVATCGDNCIKIQDLVDLKDMYVILNLDEENKGLGTLSWTDDGQLLALSTQRGSLHVFLTKLPILGDACSTRIAYLTSLLEVTVANPVEGELPITVSVDVEPNFVAVGLYHLAVGMNNRAWFYVLGENAVKKLKDMEYLGTVASICLHSDYAAALFEGKVQLHLIESEILDAQEERETRLFPAVDDKCRILCHALTSDFLIYGTDTGVVQYFYIEDWQFVNDYRHPVSVKKIFPDPNGTRLVFIDEKSDGFVYCPVNDATYEIPDFSPTIKGVLWENWPMDKGVFIAYDDDKVYTYVFHKDTIQGAKVILAGSTKVPFAHKPLLLYNGELTCQTQSGKVNNIYLSTHGFLSNLKDTGPDELRPMLAQNLMLKRFSDAWEMCRILNDEAAWNELARACLHHMEVEFAIRVYRRIGNVGIVMSLEQIKGIEDYNLLAGHLAMFTNDYNLAQDLYLASSCPIAALEMRRDLQHWDSALQLAKHLAPDQIPFISKEYAIQLEFAGDYVNALAHYEKGITGDNKEHDEACLAGVAQMSIRMGDIRRGVNQALKHPSRVLKRDCGAILENMKQFSEAAQLYEKGLYYDKAASVYIRSKNWAKVGDLLPHVSSPKIHLQYAKAKEADGRYKEAVVAYENAKQWQSVIRIYLDHLNNPEKAVNIVRETQSLDGAKMVARFFLQLGDYGSAIQFLVMSKCNNEAFTLAQQHNKMEIYADIIGSEDTTNEDYQSIALYFEGEKRYLQAGKFFLLCGQYSRALKHFLKCPSSEDNVAIEMAIETVGQAKDELLTNQLIDHLLGENDGMPKDAKYLFRLYMALKQYREAAQTAIIIAREEQSAGNYRNAHDVLFSMYAELKSQKIKIPSEMATNLMILHSYILVKIHVKNGDHMKGARMLIRVANNISKFPSHIVPILTSTVIECHRAGLKNSAFSFAAMLMRPEYRSKIDAKYKKKIEGMVRRPDISEIEEATTPCPFCKFLLPECELLCPGCKNSIPYCIATGRHMLKDDWTVCPHCDFPALYSELKIMLNTESTCPMCSERLNAAQLKKISDCTQYLRTEEEL

SEQ ID NO: 99 - protein, 686 aa, Homo sapiens
MKNNIINTQQSFVTMPNVIVPDIEKEIRRMENGACSSFSEDDDSASTSEESENENPHARGSFSYKSLRKGGPSQREQYLPGAIALFNVNNSSNKDQEPEEKKKKKKEKKSKSDDKNENKNDPEKKKKKKDKEKKKKEEKSKDKKEEEKKEVVVIDPSGNTYYNWLFCITLPVMYNWTMVIARACFDELQSDYLEYWLILDYVSDIVYLIDMFVRTRTGYLEQGLLVKEELKLINKYKSNLQFKLDVLSLIPTDLLYFKLGWNYPEIRLNRLLRFSRMFEFFQRTETRTNYPNIFRISNLVMYIVIIIHWNACVFYSISKAIGFGNDTWVYPDINDPEFGRLARKYVYSLYWSTLTLTTIGETPPPVRDSEYVFVVVDFLIGVLIFATIVGNIGSMISNMNAARAEFQARIDAIKQYMHFRNVSKDMEKRVIKWFDYLWTNKKTVDEKEVLKYLPDKLRAEIAINVHLDTLKKVRIFADCEAGLLVELVLKLQPQVYSPGDYICKKGDIGREMYIIKEGKLAVVADDGVTQFVVLSDGSYFGEISILNIKGSKAGNRRTANIKSIGYSDLFCLSKDDLMEALTEYPDAKTMLEEKGKQILMKDGLLDLNIANAGSDPKDLEEKVTRMEGSVDLLQTRFARILAEYESMQQKLKQRLTKVEKFLKPLIDTEFSSIEGPGAESGPIDST

SEQ ID NO: 100 - protein, 135 aa, Homo sapiens
MVLESVARIVKVQLPAYLKRLPVPESITGFARLTVSEWLRLLPFLGVLALLGYLAVRPFLPKKKQQKDSLINLKIQKENPKVVNEINIEDLCLTKAAYCRCWRSKTFPACDGSHNKHNELTGDNVGPLILKKKEV

SEQ ID NO: 101 - protein, 894 aa, Homo sapiens
MILLAVLFLCFISSYSASVKGHTTGLSLNNDRLYKLTYSTEVLLDRGKGKLQDSVGYRISSNVDVALLWRNPDGDDDQLIQITMKDVNVENVNQQRGEKSIFKGKSPSKIMGKENLEALQRPTLLHLIHGKVKEFYSYQNEAVAIENIKRGLASLFQTQLSSGTTNEVDISGNCKVTYQAHQDKVIKIKALDSCKIARSGFTTPNQVLGVSSKATSVTTYKIEDSFVIAVLAEETHNFGLNFLQTIKGKIVSKQKLELKTTEAGPRLMSGKQAAAIIKAVDSKYTAIPIVGQVFQSHCKGCPSLSELWRSTRKYLQPDNLSKAEAVRNFLAFIQHLRTAKKEEILQILKMENKEVLPQLVDAVTSAQTSDSLEAILDFLDFKSDSSIILQERFLYACGFASHPNEELLRALISKFKGSIGSSDIRETVMIITGTLVRKLCQNEGCKLKAVVEAKKLILGGLEKAEKKEDTRMYLLALKNALLPEGIPSLLKYAEAGEGPISHLATTALQRYDLPFITDEVKKTLNRIYHQNRKVHEKTVRTAAAAIILNNNPSYMDVKNILLSIGELPQEMNKYMLAIVQDILRFEMPASKIVRRVLKEMVAHNYDRFSRSGSSSAYTGYIERSPRSASTYSLDILYSGSGILRRSNLNIFQYIGKAGLHGSQVVIEAQGLEALIAATPDEGEENLDSYAGMSAILFDVQLRPVTFFNGYSDLMSKMLSASGDPISVVKGLILLIDHSQELQLQSGLKANIEVQGGLAIDISGAMEFSLWYRESKTRVKNRVTVVITTDITVDSSFVKAGLETSTETEAGLEFISTVQFSQYPFLVCMQMDKDEAPFRQFEKKYERLSTGRGYVSQKRKESVLAGCEFPLHQENSEMCKVVFAPQPDSTSSGWF

SEQ ID NO: 102 - protein, 679 aa, Homo sapiens
MHLFACLCIVLSFLEGVGCLCPSQCTCDYHGRNDGSGSRLVLCNDMDMNELPTNLPVDTVKLRIEKTVIRRISAEAFYYLVELQYLWVTYNSVASIDPSSFYNLKQLHELRLDGNSLAAFPWASLLDMPLLRTLDLHNNKITSVPNEALRYLKNLAYLDLSSNRLTTLPPDFLESWTHLVSTPSGVLDLSPSRIILGLQDNPWFCDCHISKMIELSKVVDPAIVLLDPLMTCSEPERLTGILFQRAELEHCLKPSVMTSATKIMSALGSNVLLRCDATGFPTPQITWTRSDSSPVNYTVIQESPEEGVRWSIMSLTGISSKDAGDYKCKAKNLAGMSEAVVTVTVLGITTTPIPPDTSERTGDHPEWDVQPGSGRSTSVSSASSYLWSSSFSPTSSFSASTLSPPSTASFSLSPFSSSTVSSTTTLSTSISASTTMANKRSFQLHQGGKRNLKVAKNGSKLPPASTSKKEELALLDQTMLTETNAAIENLRVVSETKESVTLTWNMINTTHNSAVTVLYSKYGGKDLLLLNADSSKNQVTIDGLEPGGQYMACVCPKGVPPQKDQCITFSTERVEGDDSQWSLLLVVTSTACVVILPLICFLLYKVCKLQCKSEPFWEDDLAKETYIQFETLFPRSQSVGELWTRSHRDDSEKLLLCSRSSVESQVTFKSEGSRPEYYC

SEQ ID NO: 103 - protein, 715 aa, Homo sapiens
MDLILNRMDYLQVGVTSQKTMKLIPASRHRATQKVVIGDHDGVVMCFGMKKGEAAAVFKTLPGPKIARLELGGVINTPQEKIFIAAASEIRGFTKRGKQFLSFETNLTESIKAMHISGSDLFLSASYIYNHYCDCKDQHYYLSGDKINDVICLPVERLSRITPVLACQDRVLRVLQGSDVMYAVEVPGPPTVLALHNGNGGDSGEDLLFGTSDGKLALIQITTSKPVRKWEIQNEKKRGGILCIDSFDIVGDGVKDLLVGRDDGMVEVYSFDNANEPVLRFDQMLSESVTSIQGGCVGKDSYDEIVVSTYSGWVTGLTTEPIHKESGPGEELKINQEMQNKISSLRNELEHLQYKVLQERENYQQSSQSSKAKSAVPSFGINDKFTLNKDDASYSLILEVQTAIDNVLIQSDVPIDLLDVDKNSAVVSFSSCDSESNDNFLLATYRCQADTTRLELKIRSIEGQYGTLQAYVTPRIQPKTCQVRQYHIKPLSLHQRTHFIDHDRPMNTLTLTGQFSFAEVHSWVVFCLPEVPEKPPAGECVTFYFQNTFLDTQLESTYRKGEGVFKSDNISTISILKDVLSKEATKRKINLNISYEINEVSVKHTLKLIHPKLEYQLLLAKKVQLIDALKELQIHEGNTNFLIPEYHCILEEADHLQEEYKKQPAHLERLYGMITDLFIDKFKFKGTNVKTKVPLLLEILDSYDQNALISFFDAA

SEQ ID NO: 104 - protein, 710 aa, Homo sapiens
MVMACRVVNKRRHMGLQQLSSFAETGRTFLGPLKSSKFIIDEECHESVLISSTVRLLESLDLTSAVGQLLNEAVQAQNNTYRTGISTLLFLVGAWSSAVEECLHLGVPISIIVSVMSEGLNFCSEEVVSLHVPVHNIFDCMDSTKTFSQLETFSVSLCPFLQVPSDTDLIEELHGLKDVASQTLTISNLSGRPLKSYELFKPQTKVEADNNTSRTLKNSLLADTCCRQSILIHSRHFNRTDNTEGVSKPDGFQEHVTATHKTYRCNDLVELAVGLSHGDHSSMKLVEEAVQLQYQNACVQQGNCTKPFMFDISRIFTCCLPGLPETSSCVCPGYITVVSVSNNPVIKELQNQPVRIVLIEGDLTENYRHLGFNKSANIKTVLDSMRLQEDSSEELWANHVLQVLIQFKVNLVLVQGNVSERLIEKCINSKRLVIGSVNGSVMQAFAEAAGAVQVAYITQVNEDCVGDGVCVTFWRSSPLDVVDRNNRIAILLKTEGINLVTAVLTNPVTAQMQIKEDRFWTCAYRLYYALKEEKVFLGGGAVEFLCLSCLHILAEQSLKKENHACSGWLHNTSSWLASSLAIYRPTVLKFLANGWQKYLSTLLYNTANYSSEFEASTYIQHHLQNATDSGSPSSYILNEYSKLNSRIFNSDISNKLEQIPRVYDVVTPKIEAWRRALDLVLLVLQTDSEIITGHGHTQINSQELTGFLFL

SEQ ID NO: 105 - protein, 518 aa, Homo sapiens
MAGLRNESEQEPLLGDTPGSREWDILETEEHYKSRWRSIRILYLTMFLSSVGFSVVMMSIWPYLQKIDPTADTSFLGWVIASYSLGQMVASPIFGLWSNYRPRKEPLIVSILISVAANCLYAYLHIPASHNKYYMLVARGLLGIGAGNVAVVRSYTAGATSLQERTSSMANISMCQALGFILGPVFQTCFTFLGEKGVTWDVIKLQINMYTTPVLLSAFLGILNIILILAILREHRVDDSGRQCKSINFEEASTDEAQVPQGNIDQVAVVAINVLFFVTLFIFALFETIITPLTMDMYAWTQEQAVLYNGIILAALGVEAVVIFLGVKLLSKKIGERAILLGGLIVVWVGFFILLPWGNQFPKIQWEDLHNNSIPNTTFGEIIIGLWKSPMEDDNERPTGCSIEQAWCLYTPVIHLAQFLTSAVLIGLGYPVCNLMSYTLYSKILGPKPQGVYMGWLTASGSGARILGPMFISQVYAHWGPRWAFSLVCGIIVLTITLLGVVYKRLIALSVRYGRIQE

SEQ ID NO: 106 - protein, 970 aa, Homo sapiens
MATCIGEKIEDFKVGNLLGKGSFAGVYRAESIHTGLEVAIKMIDKKAMYKAGMVQRVQNEVKIHCQLKHPSILELYNYFEDSNYVYLVLEMCHNGEMNRYLKNRVKPFSENEARHFMHQIITGMLYLHSHGILHRDLTLSNLLLTRNMNIKIADFGLATQLKMPHEKHYTLCGTPNYISPEIATRSAHGLESDVWSLGCMFYTLLIGRPPFDTDTVKNTLNKVVLADYEMPSFLSIEAKDLIHQLLRRNPADRLSLSSVLDHPFMSRNSSTKSKDLGTVEDSIDSGHATISTAITASSSTSISGSLFDKRRLLIGQPLPNKMTVFPKNKSSTDFSSSGDGNSFYTQWGNQETSNSGRGRVIQDAEERPHSRYLRRAYSSDRSGTSNSQSQAKTYTMERCHSAEMLSVSKRSGGGENEERYSPTDNNANIFNFFKEKTSSSSGSFERPDNNQALSNHLCPGKTPFPFADPTPQTETVQQWFGNLQINAHLRKTTEYDSISPNRDFQGHPDLQKDTSKNAWTDTKVKKNSDASDNAHSVKQQNTMKYMTALHSKPEIIQQECVFGSDPLSEQSKTRGMEPPWGYQNRTLRSITSPLVAHRLKPIRQKTKKAVVSILDSEEVCVELVKEYASQEYVKEVLQISSDGNTITIYYPNGGRGFPLADRPPSPTDNISRYSFDNLPEKYWRKYQYASRFVQLVRSKSPKITYFTRYAKCILMENSPGADFEVWFYDGVKIHKTEDFIQVIEKTGKSYTLKSESEVNSLKEEIKMYMDHANEGHRICLALESIISEEERKTRSAPFFPIIIGRKPGSTSSPKALSPPPSVDSNYPTRERASFNRMVMHSAASPTQAPILNPSMVTNEGLGLTTTASGTDISSNSLKDCLPKSAQLLKSVFVKNVGWATQLTSGAVWVQFNDGSQLVVQAGVSSISYTSPNGQTTRYGENEKLPDYIKQKLQCLSSILLMFSNPTPNFH

SEQ ID NO: 107 - protein, 230 aa, Homo sapiens
MKNPMLEVVSLLLEKLLLISNFTLFSSGAAGEDKGRNSFYETSSFHRGDVLEVPRTHLTHYGIYLGDNRVAHMMPDILLALTDDMGRTQKVVSNKRLILGVIVKVASIRVDTVEDFAYGANILVNHLDESLQKKALLNEEVARRAEKLLGFTPYSLLWNNCEHFVTYCRYGTPISPQSDKFCETVKIIIRDQRSVLASAVLGLASIVCTGLVSYTTLPAIFIPFFLWMAG

SEQ ID NO: 108 - protein, 904 aa, Homo sapiens
MRQTLPCIYFWGGLLPFGMLCASSTTKCTVSHEVADCSHLKLTQVPDDLPTNITVLNLTHNQLRRLPAANFTRYSQLTSLDVGFNTISKLEPELCQKLPMLKVLNLQHNELSQLSDKTFAFCTNLTELHLMSNSIQKIKNNPFVKQKNLITLDLSHNGLSSTKLGTQVQLENLQELLLSNNKIQALKSEELDIFANSSLKKLELSSNQIKEFSPGCFHAIGRLFGLFLNNVQLGPSLTEKLCLELANTSIRNLSLSNSQLSTTSNTTFLGLKWTNLTMLDLSYNNLNVVGNDSFAWLPQLEYFFLEYNNIQHLFSHSLHGLFNVRYLNLKRSFTKQSISLASLPKIDDFSFQWLKCLEHLNMEDNDIPGIKSNMFTGLINLKYLSLSNSFTSLRTLTNETFVSLAHSPLHILNLTKNKISKIESDAFSWLGHLEVLDLGLNEIGQELTGQEWRGLENIFEIYLSYNKYLQLTRNSFALVPSLQRLMLRRVALKNVDSSPSPFQPLRNLTILDLSNNNIANINDDMLEGLEKLEILDLQHNNLARLWKHANPGGPIYFLKGLSHLHILNLESNGFDEIPVEVFKDLFELKIIDLGLNNLNTLPASVFNNQVSLKSLNLQKNLITSVEKKVFGPAFRNLTELDMRFNPFDCTCESIAWFVNWINETHTNIPELSSHYLCNTPPHYHGFPVRLFDTSSCKDSAPFELFFMINTSILLIFIFIVLLIHFEGWRISFYWNVSVHRVLGFKEIDRQTEQFEYAAYIIHAYKDKDWVWEHFSSMEKEDQSLKFCLEERDFEAGVFELEAIVNSIKRSRKIIFVITHHLLKDPLCKRFKVHHAVQQAIEQNLDSIILVFLEEIPDYKLNHALCLRRGMFKSHCILNWPVQKERIGAFRHKLQVALGSKNSVH

SEQ ID NO: 109 - protein, 525 aa, Homo sapiens
MAGLWLGLVWQKLLLWGAASALSLAGASLVLSLLQRVASYARKWQQMRPIPTVARAYPLVGHALLMKPDGREFFQQIIEYTEEYRHMPLLKLWVGPVPMVALYNAENVEVILTSSKQIDKSSMYKFLEPWLGLGLLTSTGNKWRSRRKMLTPTFHFTILEDFLDIMNEQANILVKKLEKHINQEAFNCFFYITLCALDIICETAMGKNIGAQSNDDSEYVRAVYRMSEMIFRRIKMPWLWLDLWYLMFKEGWEHKKSLQILHTFTNSVIAERANEMNANEDCRGDGRGSAPSKNKRRAFLDLLLSVTDDEGNRLSHEDIREEVDTFMFEGHDTTAAAINWSLYLLGSNPEVQKKVDHELDDVFGKSDRPATVEDLKKLRYLECVIKETLRLFPSVPLFARSVSEDCEVAGYRVLKGTEAVIIPYALHRDPRYFPNPEEFQPERFFPENAQGRHPYAYVPFSAGPRNCIGQKFAVMEEKTILSCILRHFWIESNQKREELGLEGQLILRPSNGIWIKLKRRNADER

SEQ ID NO: 110 - protein, 472 aa, Homo sapiens
MSNIYIQEPPTNGKVLLKTTAGDIDIELWSKEAPKACRNFIQLCLEAYYDNTIFHRVVPGFIVQGGDPTGTGSGGESIYGAPFKDEFHSRLRFNRRGLVAMANAGSHDNGSQFFFTLGRADELNNKHTIFGKVTGDTVYNMLRLSEVDIDDDERPHNPHKIKSCEVLFNPFDDIIPREIKRLKKEKPEEEVKKLKPKGTKNFSLLSFGEEAEEEEEEVNRVSQSMKGKSKSSHDLLKDDPHLSSVPVVESEKGDAPDLVDDGEDESAEHDEYIDGDEKNLMRERIAKKLKKDTSANVKSAGEGEVEKKSVSRSEELRKEARQLKRELLAAKQKKVENAAKQAEKRSEEEEAPPDGAVAEYRREKQKYEALRKQQSKKGTSREDQTLALLNQFKSKLTQAIAETPENDIPETEVEDDEGWMSHVLQFEDKSRKVKDASMQDSDTFEIYDPRNPVNKRRREESKKLMREKKERR

SEQ ID NO: 111 - protein, 575 aa, Homo sapiens
MSSDEEKYSLPVVQNDSSRGSSVSSNLQEEYEELLHYAIVTPNIEPCASQSSHPKGELVPDVRISTIHDILHSQGNNSEVRETAIEVGKGCDFHISSHSKTDESSPVLSPRKPSHPVMDFFSSHLLADSSSPATNSSHTDAHEILVSDFLVSDENLQKMENVLDLWSSGLKTNIISELSKWRLNFIDWHRMEMRKEKEKHAAHLKQLCNQINELKELQKTFEISIGRKDEVISSLSHAIGKQKEKIELMRTFFHWRIGHVRARQDVYEGKLADQYYQRTLLKKVWKVWRSVVQKQWKDVVERACQARAEEVCIQISNDYEAKVAMLSGALENAKAEIQRMQHEKEHFEDSMKKAFMRGVCALNLEAMTIFQNRNDAGIDSTNNKKEEYGPGVQGKEHSAHLDPSAPPMPLPVTSPLLPSPPAAVGGASATAVPSAASMTSTRAASASSVHVPVSALGAGSAATAASEEMYVPRVVTSAQQKAGRTITARITGRCDFASKNRISSSLAIMGVSPPMSSVVVEKHHPVTVQTIPQATAAKYPRTIHPESSTSASRSLGTRSAHTQSLTSVHSIKVVD

SEQ ID NO: 112 - protein, 3396 aa, Homo sapiens
MFINIKSILWMCSTLIVTHALHKVKVGKSPPVRGSLSGKVSLPCHFSTMPTLPPSYNTSEFLRIKWSKIEVDKNGKDLKETTVLVAQNGNIKIGQDYKGRVSVPTHPEAVGDASLTVVKLLASDAGLYRCDVMYGIEDTQDTVSLTVDGVVFHYRAATSRYTLNFEAAQKACLDVGAVIATPEQLFAAYEDGFEQCDAGWLADQTVRYPIRAPRVGCYGDKMGKAGVRTYGFRSPQETYDVYCYVDHLDGDVFHLTVPSKFTFEEAAKECENQDARLATVGELQAAWRNGFDQCDYGWLSDASVRHPVTVARAQCGGGLLGVRTLYRFENQTGFPPPDSRFDAYCFKPKEATTIDLSILAETASPSLSKEPQMVSDRTTPIIPLVDELPVIPTEFPPVGNIVSFEQKATVQPQAITDSLATKLPTPTGSTKKPWDMDDYSPSASGPLGKLDISEIKEEVLQSTTGVSHYATDSWDGVVEDKQTQESVTQIEQIEVGPLVTSMEILKHIPSKEFPVTETPLVTARMILESKTEKKMVSTVSELVTTGHYGFTLGEEDDEDRTLTVGSDESTLIFDQIPEVITVSKTSEDTIHTHLEDLESVSASTTVSPLIMPDNNGSSMDDWEERQTSGRITEEFLGKYLSTTPFPSQHRTEIELFPYSGDKILVEGISTVIYPSLQTEMTHRRERTETLIPEMRTDTYTDEIQEEITKSPFMGKTEEEVFSGMKLSTSLSEPIHVTESSVEMTKSFDFPTLITKLSAEPTEVRDMEEDFTATPGTTKYDENITTVLLAHGTLSVEAATVSKWSWDEDNTTSKPLESTEPSASSKLPPALLTTVGMNGKDKDIPSFTEDGADEFTLIPDSTQKQLEEVTDEDIAAHGKFTIRFQPTTSTGIAEKSTLRDSTTEEKVPPITSTEGQVYATMEGSALGEVEDVDLSKPVSTVPQFAHTSEVEGLAFVSYSSTQEPTTYVDSSHTIPLSVIPKTDWGVLVPSVPSEDEVLGEPSQDILVIDQTRLEATISPETMRTTKITEGTTQEEFPWKEQTAEKPVPALSSTAWTPKEAVTPLDEQEGDGSAYTVSEDELLTGSERVPVLETTPVGKIDHSVSYPPGAVTEHKVKTDEVVTLTPRIGPKVSLSPGPEQKYETEGSSTTGFTSSLSPFSTHITQLMEETTTEKTSLEDIDLGSGLFEKPKATELIEFSTIKVTVPSDITTAFSSVDRLHTTSAFKPSSAITKKPPLIDREPGEETTSDMVIIGESTSHVPPTTLEDIVAKETETDIDREYFTTSSPPATQPTRPPTVEDKEAFGPQALSTPQPPASTKFHPDINVYIIEVRENKTGRMSDLSVIGHPIDSESKEDEPCSEETDPVHDLMAEILPEFPDIIEIDLYHSEENEEEEEECANATDVTTTPSVQYINGKHLVTTVPKDPEAAEARRGQFESVAPSQNFSDSSESDTHPFVIAKTELSTAVQPNESTETTESLEVTWKPETYPETSEHFSGGEPDVFPTVPFHEEFESGTAKKGAESVTERDTEVGHQAHEHTEPVSLFPEESSGEIAIDQESQKIAFARATEVTFGEEVEKSTSVTYTPTIVPSSASAYVSEEEAVTLIGNPWPDDLLSTKESWVEATPRQVVELSGSSSIPITEGSGEAEEDEDTMFTMVTDLSQRNTTDTLITLDTSRIITESFFEVPATTIYPVSEQPSAKVVPTKFVSETDTSEWISSTTVEEKKRKEEEGTTGTASTFEVYSSTQRSDQLILPFELESPNVATSSDSGTRKSFMSLTTPTQSEREMTDSTPVFTETNTLENLGAQTTEHSSIHQPGVQEGLTTLPRSPASVFMEQGSGEAAADPETTTVSSFSLNVEYAIQAEKEVAGTLSPHVETTFSTEPTGLVLSTVMDRVVAENITQTSREIVISERLGEPNYGAEIRGFSTGFPLEEDFSGDFREYSTVSHPIAKEETVMMEGSGDAAFRDTQTSPSTVPTSVHISHISDSEGPSSTMVSTSAFPWEEFTSSAEGSGEQLVTVSSSVVPVLPSAVQKFSGTASSIIDEGLGEVGTVNEIDRRSTILPTAEVEGTKAPVEKEEVKVSGTVSTNFPQTIEPAKLWSRQEVNPVRQEIESETTSEEQIQEEKSFESPQNSPATEQTIFDSQTFTETELKTTDYSVLTTKKTYSDDKEMKEEDTSLVNMSTPDPDANGLESYTTLPEATEKSHFFLATALVTESIPAEHVVTDSPIKKEESTKHFPKGMRPTIQESDTELLFSGLGSGEEVLPTLPTESVNFTEVEQINNTLYPHTSQVESTSSDKIEDFNRMENVAKEVGPLVSQTDIFEGSGSVTSTTLIEILSDTGAEGPTVAPLPFSTDIGHPQNQTVRWAEEIQTSRPQTITEQDSNKNSSTAEINETTTSSTDFLARAYGFEMAKEFVTSAPKPSDLYYEPSGEGSGEVDIVDSFHTSATTQATRQESSTTFVSDGSLEKHPEVPSAKAVTADGFPTVSVMLPLHSEQNKSSPDPTSTLSNTVSYERSTDGSFQDRFREFEDSTLKPNRKKPTENIIIDLDKEDKDLILTITESTILEILPELTSDKNTIIDIDHTKPVYEDILGMQTDIDTEVPSEPHDSNDESNDDSTQVQEIYEAAVNLSLTEETFEGSADVLASYTQATHDESMTYEDRSQLDHMGFHFTTGIPAPSTETELDVLLPTATSLPIPRKSATVIPEIEGIKAEAKALDDMFESSTLSDGQAIADQSEIIPTLGQFERTQEEYEDKKHAGPSFQPEFSSGAEEALVDHTPYLSIATTHLMDQSVTEVPDVMEGSNPPYYTDTTLAVSTFAKLSSQTPSSPLTIYSGSEASGHTEIPQPSALPGIDVGSSVMSPQDSFKEIHVNIEATFKPSSEEYLHITEPPSLSPDTKLEPSEDDGKPELLEEMEASPTELIAVEGTEILQDFQNKTDGQVSGEAIKMFPTIKTPEAGTVITTADEIELEGATQWPHSTSASATYGVEAGVVPWLSPQTSERPTLSSSPEINPETQAALIRGQDSTIAASEQQVAARILDSNDQATVNPVEFNTEVATPPFSLLETSNETDFLIGINEESVEGTAIYLPGPDRCKMNPCLNGGTCYPTETSYVCTCVPGYSGDQCELDFDECHSNPCRNGATCVDGFNTFRCLCLPSYVGALCEQDTETCDYGWHKFQGQCYKYFAHRRTWDAAERECRLQGAHLTSILSHEEQMFVNRVGHDYQWIGLNDKMFEHDFRWTDGSTLQYENWRPNQPDSFFSAGEDCVVIIWHENGQWNDVPCNYHLTYTCKKGTVACGQPPVVENAKTFGKMKPRYEINSLIRYHCKDGFIQRHLPTIRCLGNGRWAIPKITCMNPSAYQRTYSMKYFKNSSSAKDNSINTSKHDHRWSRRWQESRR

SEQ ID NO: 113 - protein, 6306 aa, Homo sapiens
MSVFLGPGMPSASLLVNLLSALLILFVFGETEIRFTGQTEFVVNETSTTVIRLIIERIGEPANVTAIVSLYGEDAGDFFDTYAAAFIPAGETNRTVYIAVCDDDLPEPDETFIFHLTLQKPSANVKLGWPRTVTVTILSNDNAFGIISFNMLPSIAVSEPKGRNESMPLTLIREKGTYGMVMVTFEVEGGPNPPDEDLSPVKGNITFPPGRATVIYNLTVLDDEVPENDEIFLIQLKSVEGGAEINTSRNSIEIIIKKNDSPVRFLQSIYLVPEEDHILIIPVVRGKDNNGNLIGSDEYEVSISYAVTTGNSTAHAQQNLDFIDLQPNTTVVFPPFIHESHLKFQIVDDTIPEIAESFHIMLLKDTLQGDAVLISPSVVQVTIKPNDKPYGVLSFNSVLFERTVIIDEDRISRYEEITVVRNGGTHGNVSANWVLTRNSTDPSPVTADIRPSSGVLHFAQGQMLATIPLTVVDDDLPEEAEAYLLQILPHTIRGGAEVSEPAELLFYIQDSDDVYGLITFFPMENQKIESSPGERYLSLSFTRLGGTKGDVRLLYSVLYIPAGAVDPLQAKEGILNISRRNDLIFPEQKTQVTTKLPIRNDAFLQNGAHFLVQLETVELLNIIPLIPPISPRFGEICNISLLVTPAIANGEIGFLSNLPIILHEPEDFAAEVVYIPLHRDGTDGQATVYWSLKPSGFNSKAVTPDDIGPFNGSVLFLSGQSDTTINITIKGDDIPEMNETVTLSLDRVNVENQVLKSGYTSRDLIILENDDPGGVFEFSPASRGPYVIKEGESVELHIIRSRGSLVKQFLHYRVEPRDSNEFYGNTGVLEFKPGEREIVITLLARLDGIPELDEHYWVVLSSHGERESKLGSATIVNITILKNDDPHGIIEFVSDGLIVMINESKGDAIYSAVYDVVRNRGNFGDVSVSWVVSPDFTQDVFPVQGTVVFGDQEFSKNITIYSLPDEIPEEMEEFTVILLNGTGGAKVGNRTTATLRIRRNDDPIYFAEPRVVRVQEGETANFTVLRNGSVDVTCMVQYATKDGKATARERDFIPVEKGETLIFEVGSRQQSISIFVNEDGIPETDEPFYIILLNSTGDTVVYQYGVATVIIEANDDPNGIFSLEPIDKAVEEGKTNAFWILRHRGYFGSVSVSWQLFQNDSALQPGQEFYETSGTVNFMDGEEAKPIILHAFPDKIPEFNEFYFLKLVNISGGSPGPGGQLAETNLQVTVMVPFNDDPFGVFILDPECLEREVAEDVLSEDDMSYITNFTILRQQGVFGDVQLGWEILSSEFPAGLPPMIDFLLVGIFPTTVHLQQHMRRHHSGTDALYFTGLEGAFGTVNPKYHPSRNNTIANFTFSAWVMPNANTNGFIIAKDDGNGSIYYGVKIQTNESHVTLSLHYKTLGSNATYIAKTTVMKYLEESVWLHLLIILEDGIIEFYLDGNAMPRGIKSLKGEAITDGPGILRIGAGINGNDRFTGLMQDVRSYERKLTLEEIYELHAMPAKSDLHPISGYLEFRQGETNKSFIISARDDNDEEGEELFILKLVSVYGGARISEENTTARLTIQKSDNANGLFGFTGACIPEIAEEGSTISCVVERTRGALDYVHVFYTISQIETDGINYLVDDFANASGTITFLPWQRSEVLNIYVLDDDIPELNEYFRVTLVSAIPGDGKLGSTPTSGASIDPEKETTDITIKASDHPYGLLQFSTGLPPQPKDAMTLPASSVPHITVEEEDGEIRLLVIRAQGLLGRVTAEFRTVSLTAFSPEDYQNVAGTLEFQPGERYKYIFINITDNSIPELEKSFKVELLNLEGGVAELFRVDGSGSGDGDMEFFLPTIHKRASLGVASQILVTIAASDHAHGVFEFSPESLFVSGTEPEDGYSTVTLNVIRHHGTLSPVTLHWNIDSDPDGDLAFTSGNITFEIGQTSANITVEILPDEDPELDKAFSVSVLSVSSGSLGAHINATLTVLASDDPYGIFIFSEKNRPVKVEEATQNITLSIIRLKGLMGKVLVSYATLDDMEKPPYFPPNLARATQGRDYIPASGFALFGANQSEATIAISILDDDEPERSESVFIELLNSTLVAKVQSRSIPNSPRLGPKVETIAQLIIIANDDAFGTLQLSAPIVRVAENHVGPIINVTRTGGAFADVSVKFKAVPITAIAGEDYSIASSDVVLLEGETSKAVPIYVINDIYPELEESFLVQLMNETTGGARLGALTEAVIIIEASDDPYGLFGFQITKLIVEEPEFNSVKVNLPIIRNSGTLGNVTVQWVATINGQLATGDLRVVSGNVTFAPGETIQTLLLEVLADDVPEIEEVIQVQLTDASGGGTIGLDRIANIIIPANDDPYGTVAFAQMVYRVQEPLERSSCANITVRRSGGHFGRLLLFYSTSDIDVVALAMEEGQDLLSYYESPIQGVPDPLWRTWMNVSAVGEPLYTCATLCLKEQACSAFSFFSASEGPQCFWMTSWISPAVNNSDFWTYRKNMTRVASLFSGQAVAGSDYEPVTRQWAIMQEGDEFANLTVSILPDDFPEMDESFLISLLEVHLMNISASLKNQPTIGQPNISTVVIALNGDAFGVFVIYNISPNTSEDGLFVEVQEQPQTLVELMIHRTGGSLGQVAVEWRVVGGTATEGLDFIGAGEILTFAEGETKKTVILTILDDSEPEDDESIIVSLVYTEGGSRILPSSDTVRVNILANDNVAGIVSFQTASRSVIGHEGEILQFHVIRTFPGRGNVTVNWKIIGQNLELNFANFSGQLFFPEGSLNTTLFVHLLDDNIPEEKEVYQVILYDVRTQGVPPAGIALLDAQGYAAVLTVEASDEPHGVLNFALSSRFVLLQEANITIQLFINREFGSLGAINVTYTTVPGMLSLKNQTVGNLAEPEVDFVPIIGFLILEEGETAAAINITILEDDVPELEEYFLVNLTYVGLTMAASTSFPPRLDSEGLTAQVIIDANDGARGVIEWQQSRFEVNETHGSLTLVAQRSREPLGHVSLFVYAQNLEAQVGLDYIFTPMILHFADGERYKNVNIMILDDDIPEGDEKFQLILTNPSPGLELGKNTIALIIVLANDDGPGVLSFNNSEHFFLREPTALYVQESVAVLYIVREPAQGLFGTVTVQFIVTEVNSSNESKDLTPSKGYIVLEEGVRFKALQISAILDTEPEMDEYFVCTLFNPTGGARLGVHVQTLITVLQNQAPLGLFSISAVENRATSIDIEEANRTVYLNVSRTNGIDLAVSVQWETVSETAFGMRGMDVVFSVFQSFLDESASGWCFFTLENLIYGIMLRKSSVTVYRWQGIFIPVEDLNIENPKTCEAFNIGFSPYFVITHEERNEEKPSLNSVFTFTSGFKLFLVQTIIILESSQVRYFTSDSQDYLIIASQRDDSELTQVFRWNGGSFVLHQKLPVRGVLTVALFNKGGSVFLAISQANARLNSLLFRWSGSGFINFQEVPVSGTTEVEALSSANDIYLIFAENVFLGDQNSIDIFIWEMGQSSFRYFQSVDFAAVNRIHSFTPASGIAHILLIGQDMSALYCWNSERNQFSFVLEVPSAYDVASVTVKSLNSSKNLIALVGAHSHIYELAYISSHSDFIPSSGELIFEPGEREATIAVNILDDTVPEKEESFKVQLKNPKGGAEIGINDSVTITILSNDDAYGIVAFAQNSLYKQVEEMEQDSLVTLNVERLKGTYGRITIAWEADGSISDIFPTSGVILFTEGQVLSTITLTILADNIPELSEVVIVTLTRITTEGVEDSYKGATIDQDRSKSVITTLPNDSPFGLVGWRAASVFIRVAEPKENTTTLQLQIARDKGLLGDIAIHLRAQPNFLLHVDNQATENEDYVLQETIIIMKENIKEAHAEVSILPDDLPELEEGFIVTITEVNLVNSDFSTGQPSVRRPGMEIAEIMIEENDDPRGIFMFHVTRGAGEVITAYEVPPPLNVLQVPVVRLAGSFGAVNVYWKASPDSAGLEDFKPSHGILEFADKQVTAMIEITIIDDAEFELTETFNISLISVAGGGRLGDDVVVTVVIPQNDSPFGVFGFEEKTVMIDESLSSDDPDSYVTLTVVRSPGGKGTVRLEWTIDEKAKHNLSPLNGTLHFDETESQKTIVLHTLQDTVLEEDRRFTIQLISIDEVEISPVKGSASIIIRGDKRASGEVGIAPSSRHILIGEPSAKYNGTAIISLVRGPGILGEVTVFWRIFPPSVGEFAETSGKLTMRDEQSAVIVVIQALNDDIPEEKSFYEFQLTAVSEGGVLSESSSTANITVVASDSPYGRFAFSHEQLRVSEAQRVNITIIRSSGDFGHVRLWYKTMSGTAEAGLDFVPAAGELLFEAGEMRKSLHVEILDDDYPEGPEEFSLTITKVELQGRGYDFTIQENGLQIDQPPEIGNISIVRIIIMKNDNAEGIIEFDPKYTAFEVEEDVGLIMIPVVRLHGTYGYVTADFISQSSSASPGGVDYILHGSTVTFQHGQNLSFINISIIDDNESEFEEPIEILLTGATGGAVLGRHLVSRIIIAKSDSPFGVIRFLNQSKISIANPNSTMILSLVLERTGGLLGEIQVNWETVGPNSQEALLPQNRDIADPVSGLFYFGEGEGGVRTIILTIYPHEEIEVEETFIIKLHLVKGEAKLDSRAKDVTLTIQEFGDPNGVVQFAPETLSKKTYSEPLALEGPLLITFFVRRVKGTFGEIMVYWELSSEFDITEDFLSTSGFFTIADGESEASFDVHLLPDEVPEIEEDYVIQLVSVEGGAELDLEKSITWFSVYANDDPHGVFALYSDRQSILIGQNLIRSIQINITRLAGTFGDVAVGLRISSDHKEQPIVTENAERQLVVKDGATYKVDVVPIKNQVFLSLGSNFTLQLVTVMLVGGRFYGMPTILQEAKSAVLPVSEKAANSQVGFESTAFQLMNITAGTSHVMISRRGTYGALSVAWTTGYAPGLEIPEFIVVGNMTPTLGSLSFSHGEQRKGVFLWTFPSPGWPEAFVLHLSGVQSSAPGGAQLRSGFIVAEIEPMGVFQFSTSSRNIIVSEDTQMIRLHVQRLFGFHSDLIKVSYQTTAGSAKPLEDFEPVQNGELFFQKFQTEVDFEITIINDQLSEIEEFFYINLTSVEIRGLQKFDVNWSPRLNLDFSVAVITILDNDDLAGMDISFPETTVAVAVDTTLIPVETESTTYLSTSKTTTILQPTNVVAIVTEATGVSAIPEKLVTLHGTPAVSEKPDVATVTANVSIHGTFSLGPSIVYIEEEMKNGTFNTAEVLIRRTGGFTGNVSITVKTFGERCAQMEPNALPFRGIYGISNLTWAVEEEDFEEQTLTLIFLDGERERKVSVQILDDDEPEGQEFFYVFLTNPQGGAQIVEEKDDTGFAAFAMVIITGSDLHNGIIGFSEESQSGLELREGAVMRRLHLIVTRQPNRAFEDVKVFWRVTLNKTVVVLQKDGVNLVEELQSVSGTTTCTMGQTKCFISIELKPEKVPQVEVYFFVELYEATAGAAINNSARFAQIKILESDESQSLVYFSVGSRLAVAHKKATLISLQVARDSGTGLMMSVNFSTQELRSAETIGRTIISPAISGKDFVITEGTLVFEPGQRSTVLDVILTPETGSLNSFPKRFQIVLFDPKGGARIDKVYGTANITLVSDADSQAIWGLADQLHQPVNDDILNRVLHTISMKVATENTDEQLSAMMHLIEKITTEGKIQAFSVASRTLFYEILCSLINPKRKDTRGFSHFAEVTENFAFSLLTNVTCGSPGEKSKTILDSCPYLSILALHWYPQQINGHKFEGKEGDYIRIPERLLDVQDAEIMAGKSTCKLVQFTEYSSQQWFISGNNLPTLKNKVLSLSVKGQSSQLLTNDNEVLYRIYAAEPRIIPQTSLCLLWNQAAASWLSDSQFCKVVEETADYVECACSHMSVYAVYARTDNLSSYNEAFFTSGFICISGLCLAVLSHIFCARYSMFAAKLLTHMMAASLGTQILFLASAYASPQLAEESCSAMAAVTHYLYLCQFSWMLIQSVNFWYVLVMNDEHTERRYLLFFLLSWGLPAFVVILLIVILKGIYHQSMSQIYGLIHGDLCFIPNVYAALFTAALVPLTCLVVVFVVFIHAYQVKPQWKAYDDVFRGRTNAAEIPLILYLFALISVTWLWGGLHMAYRHFWMLVLFVIFNSLQGLYVFMVYFILHNQMCCPMKASYTVEMNGHPGPSTAFFTPGSGMPPAGGEISKSTQNLIGAMEEVPPDWERASFQQGSQASPDLKPSPQNGATFPSSGGYGQGSLIADEESQEFDDLIFALKTGAGLSVSDNESGQGSQEGGTLTDSQIVELRRIPIADTHL

SEQ ID NO: 114 - protein, 423 aa, Homo sapiens
MAMVVSSWRDPQDDVAGGNPGGPNPAAQAARGGGGGAGEQQQQAGSGAPHTPQTPGQPGAPATPGTAGDKGQGPPGSGQSQQHIECVVCGDKSSGKHYGQFTCEGCKSFFKRSVRRNLTYTCRANRNCPIDQHHRNQCQYCRLKKCLKVGMRREAVQRGRMPPTQPNPGQYALTNGDPLNGHCYLSGYISLLLRAEPYPTSRYGSQCMQPNNIMGIENICELAARLLFSAVEWARNIPFFPDLQITDQVSLLRLTWSELFVLNAAQCSMPLHVAPLLAAAGLHASPMSADRVVAFMDHIRIFQEQVEKLKALHVDSAEYSCLKAIVLFTSDACGLSDAAHIESLQEKSQCALEEYVRSQYPNQPSRFGKLLLRLPSLRTVSSSVIEQLFFVRLVGKTPIETLIRDMLLSGSSFNWPYMSIQCS

SEQ ID NO: 115 - protein, 418 aa, Homo sapiens
MHPRRPDGFDGLGYRGGARDEQGFGGAFPARSFSTGSDLGHWVTTPPDIPGSRNLHWGEKSPPYGVPTTSTPYEGPTEEPFSSGGGGSVQGQSSEQLNRFAGFGIGLASLFTENVLAHPCIVLRRQCQVNYHAQHYHLTPFTVINIMYSFNKTQGPRALWKGMGSTFIVQGVTLGAEGIISEFTPLPREVLHKWSPKQIGEHLLLKSLTYVVAMPFYSASLIETVQSEIIRDNTGILECVKEGIGRVIGMGVPHSKRLLPLLSLIFPTVLHGVLHYIISSVIQKFVLLILKRKTYNSHLAESTSPVQSMLDAYFPELIANFAASLCSDVILYPLETVLHRLHIQGTRTIIDNTDLGYEVLPINTQYEGMRDCINTIRQEEGVFGFYKGFGAVIIQYTLHAAVLQITKIIYSTLLQNNI

SEQ ID NO: 116 - protein, 906 aa, Homo sapiens
MTAVHAGNINFKWDPKSLEIRTLAVERLLEPLVTQVTTLVNTNSKGPSNKKRGRSKKAHVLAASVEQATENFLEKGDKIAKESQFLKEELVAAVEDVRKQGDLMKAAAGEFADDPCSSVKRGNMVRAARALLSAVTRLLILADMADVYKLLVQLKVVEDGILKLRNAGNEQDLGIQYKALKPEVDKLNIMAAKRQQELKDVGHRDQMAAARGILQKNVPILYTASQACLQHPDVAAYKANRDLIYKQLQQAVTGISNAAQATASDDASQHQGGGGGELAYALNNFDKQIIVDPLSFSEERFRPSLEERLESIISGAALMADSSCTRDDRRERIVAECNAVRQALQDLLSEYMGNAGRKERSDALNSAIDKMTKKTRDLRRQLRKAVMDHVSDSFLETNVPLLVLIEAAKNGNEKEVKEYAQVFREHANKLIEVANLACSISNNEEGVKLVRMSASQLEALCPQVINAALALAAKPQSKLAQENMDLFKEQWEKQVRVLTDAVDDITSIDDFLAVSENHILEDVNKCVIALQEKDVDGLDRTAGAIRGRAARVIHVVTSEMDNYEPGVYTEKVLEATKLLSNTVMPRFTEQVEAAVEALSSDPAQPMDENEFIDASRLVYDGIRDIRKAVLMIRTPEELDDSDFETEDFDVRSRTSVQTEDDQLIAGQSARAIMAQLPQEQKAKIAEQVASFQEEKSKLDAEVSKWDDSGNDIIVLAKQMCMIMMEMTDFTRGKGPLKNTSDVISAAKKIAEAGSRMDKLGRTIADHCPDSACKQDLLAYLQRIALYCHQLNICSKVKAEVQNLGGELVVSGVDSAMSLIQAAKNLMNAVVQTVKASYVASTKYQKSQGMASLNLPAVSWKMKAPEKKPLVKREKQDETQTKIKRASQKKHVNPVQALSEFKAMDSI

SEQ ID NO: 117 - protein, 509 aa, Homo sapiens
MAERAALEELVKLQGERVRGLKQQKASAELIEEEVAKLLKLKAQLGPDESKQKFVLKTPKGTRDYSPRQMAVREKVFDVIIRCFKRHGAEVIDTPVFELKETLMGKYGEDSKLIYDLKDQGGELLSLRYDLTVPFARYLAMNKLTNIKRYHIAKVYRRDNPAMTRGRYREFYQCDFDIAGNFDPMIPDAECLKIMCEILSSLQIGDFLVKVNDRRILDGMFAICGVSDSKFRTICSSVDKLDKVSWEEVKNEMVGEKGLAPEVADRIGDYVQQHGGVSLVEQLLQDPKLSQNKQALEGLGDLKLLFEYLTLFGIDDKISFDLSLARGLDYYTGVIYEAVLLQTPAQAGEEPLGVGSVAAGGRYDGLVGMFDPKGRKVPCVGLSIGVERIFSIVEQRLEALEEKIRTTETQVLVASAQKKLLEERLKLVSELWDAGIKAELLYKKNPKLLNQLQYCEEAGIPLVAIIGEQELKDGVIKLRSVTSREEVDVRREDLVEEIKRRTGQPLCIC

SEQ ID NO: 118 - protein, 860 aa, Homo sapiens
MGEVTAEEVEKFLDSNIGFAKQYYNLHYRAKLISDLLGAKEAAVDFSNYHSPSSMEESEIIFDLLRDFQENLQTEKCIFNVMKKLCFLLQADRMSLFMYRTRNGIAELATRLFNVHKDAVLEDCLVMPDQEIVFPLDMGIVGHVAHSKKIANVPNTEEDEHFCDFVDILTEYKTKNILASPIMNGKDVVAIIMAVNKVDGSHFTKRDEEILLKYLNFANLIMKVYHLSYLHNCETRRGQILLWSGSKVFEELTDIERQFHKALYTVRAFLNCDRYSVGLLDMTKQKEFFDVWPVLMGEVPPYSGPRTPDGREINFYKVIDYILHGKEDIKVIPNPPPDHWALVSGLPAYVAQNGLICNIMNAPAEDFFAFQKEPLDESGWMIKNVLSMPIVNKKEEIVGVATFYNRKDGKPFDEMDETLMESLTQFLGWSVLNPDTYESMNKLENRKDIFQDIVKYHVKCDNEEIQKILKTREVYGKEPWECEEEELAEILQAELPDADKYEINKFHFSDLPLTELELVKCGIQMYYELKVVDKFHIPQEALVRFMYSLSKGYRKITYHNWRHGFNVGQTMFSLLVTGKLKRYFTDLEALAMVTAAFCHDIDHRGTNNLYQMKSQNPLAKLHGSSILERHHLEFGKTLLRDESLNIFQNLNRRQHEHAIHMMDIAIIATDLALYFKKRTMFQKIVDQSKTYESEQEWTQYMMLEQTRKEIVMAMMMTACDLSAITKPWEVQSQVALLVAAEFWEQGDLERTVLQQNPIPMMDRNKADELPKLQVGFIDFVCTFVYKEFSRFHEEITPMLDGITNNRKEWKALADEYDAKMKVQEEKKQKQQSAKSAAAGNQPGGNPSPGGATTSKSCCIQ

SEQ ID NO: 119 - protein, 877 aa, Homo sapiens
MARPRRAREPLLVALLPLAWLAQAGLARAAGSVRLAGGLTLGGLFPVHARGAAGRACGQLKKEQGVHRLEAMLYALDRVNADPELLPGVRLGARLLDTCSRDTYALEQALSFVQALIRGRGDGDEVGVRCPGGVPPLRPAPPERVVAVVGASASSVSIMVANVLRLFAIPQISYASTAPELSDSTRYDFFSRVVPPDSYQAQAMVDIVRALGWNYVSTLASEGNYGESGVEAFVQISREAGGVCIAQSIKIPREPKPGEFSKVIRRLMETPNARGIIIFANEDDIRRVLEAARQANLTGHFLWVGSDSWGAKTSPILSLEDVAVGAITILPKRASIDGFDQYFMTRSLENNRRNIWFAEFWEENFNCKLTSSGTQSDDSTRKCTGEERIGRDSTYEQEGKVQFVIDAVYAIAHALHSMHQALCPGHTGLCPAMEPTDGRMLLQYIRAVRFNGSAGTPVMFNENGDAPGRYDIFQYQATNGSASSGGYQAVGQWAETLRLDVEALQWSGDPHEVPSSLCSLPCGPGERKKMVKGVPCCWHCEACDGYRFQVDEFTCEACPGDMRPTPNHTGCRPTPVVRLSWSSPWAAPPLLLAVLGIVATTTVVATFVRYNNTPIVRASGRELSYVLLTGIFLIYAITFLMVAEPGAAVCAARRLFLGLGTTLSYSALLTKTNRIYRIFEQGKRSVTPPPFISPTSQLVITFSLTSLQVVGMIAWLGARPPHSVIDYEEQRTVDPEQARGVLKCDMSDLSLIGCLGYSLLLMVTCTVYAIKARGVPETFNEAKPIGFTMYTTCIIWLAFVPIFFGTAQSAEKIYIQTTTLTVSLSLSASVSLGMLYVPKTYVILFHPEQNVQKRKRSLKATSTVAAPPKGEDAEAHK

SEQ ID NO: 120 - protein, 623 aa, Homo sapiens
MNRYTTMRQLGDGTYGSVLMGKSNESGELVAIKRMKRKFYSWDECMNLREVKSLKKLNHANVIKLKEVIRENDHLYFIFEYMKENLYQLMKDRNKLFPESVIRNIMYQILQGLAFIHKHGFFHRDMKPENLLCMGPELVKIADFGLARELRSQPPYTDYVSTRWYRAPEVLLRSSVYSSPIDVWAVGSIMAELYMLRPLFPGTSEVDEIFKICQVLGTPKKSDWPEGYQLASSMNFRFPQCVPINLKTLIPNASNEAIQLMTEMLNWDPKKRPTASQALKHPYFQVGQVLGPSSNHLESKQSLNKQLQPLESKPSLVEVEPKPLPDIIDQVVGQPQPKTSQQPLQPIQPPQNLSVQQPPKQQSQEKPPQTLFPSIVKNMPTKPNGTLSHKSGRRRWGQTIFKSGDSWEELEDYDFGASHSKKPSMGVFKEKRKKDSPFRLPEPVPSGSNHSTGENKSLPAVTSLKSDSELSTAPTSKQYYLKQSRYLPGVNPKKVSLIASGKEINPHTWSNQLFPKSLGPVGAELAFKRSNAGNLGSYATYNQSGYIPSFLKKEVQSAGQRIHLAPLNATASEYTWNTKTGRGQFSGRTYNPTAKNLNIVNRAQPIPSVHGRTDWVAKYGGHR

SEQ ID NO: 121 - protein, 752 aa, Homo sapiens
MGPLMVLFCLLFLYPGLADSAPSCPQNVNISGGTFTLSHGWAPGSLLTYSCPQGLYPSPASRLCKSSGQWQTPGATRSLSKAVCKPVRCPAPVSFENGIYTPRLGSYPVGGNVSFECEDGFILRGSPVRQCRPNGMWDGETAVCDNGAGHCPNPGISLGAVRTGFRFGHGDKVRYRCSSNLVLTGSSERECQGNGVWSGTEPICRQPYSYDFPEDVAPALGTSFSHMLGATNPTQKTKESLGRKIQIQRSGHLNLYLLLDCSQSVSENDFLIFKESASLMVDRIFSFEINVSVAIITFASEPKVLMSVLNDNSRDMTEVISSLENANYKDHENGTGTNTYAALNSVYLMMNNQMRLLGMETMAWQEIRHAIILLTDGKSNMGGSPKTAVDHIREILNINQKRNDYLDIYAIGVGKLDVDWRELNELGSKKDGERHAFILQDTKALHQVFEHMLDVSKLTDTICGVGNMSANASDQERTPWHVTIKPKSQETCRGALISDQWVLTAAHCFRDGNDHSLWRVNVGDPKSQWGKEFLIEKAVISPGFDVFAKKNQGILEFYGDDIALLKLAQKVKMSTHARPICLPCTMEANLALRRPQGSTCRDHENELLNKQSVPAHFVALNGSKLNINLKMGVEWTSCAEVVSQEKTMFPNLTDVREVVTDQFLCSGTQEDESPCKGESGGAVFLERRFRFFQVGLVSWGLYNPCLGSADKNSRKRAPRSKVPPPRDFHINLFRMQPWLRQHLGDVLNFLPL

SEQ ID NO: 122 - protein, 764 aa, Homo sapiens
MGSNLSPQLCLMPFILGLLSGGVTTTPWSLARPQGSCSLEGVEIKGGSFRLLQEGQALEYVCPSGFYPYPVQTRTCRSTGSWSTLKTQDQKTVRKAECRAIHCPRPHDFENGEYWPRSPYYNVSDEISFHCYDGYTLRGSANRTCQVNGRWSGQTAICDNGAGYCSNPGIPIGTRKVGSQYRLEDSVTYHCSRGLTLRGSQRRTCQEGGSWSGTEPSCQDSFMYDTPQEVAEAFLSSLTETIEGVDAEDGHGPGEQQKRKIVLDPSGSMNIYLVLDGSDSIGASNFTGAKKCLVNLIEKVASYGVKPRYGLVTYATYPKIWVKVSEADSSNADWVTKQLNEINYEDHKLKSGTNTKKALQAVYSMMSWPDDVPPEGWNRTRHVIILMTDGLHNMGGDPITVIDEIRDLLYIGKDRKNPREDYLDVYVFGVGPLVNQVNINALASKKDNEQHVFKVKDMENLEDVFYQMIDESQSLSLCGMVWEHRKGTDYHKQPWQAKISVIRPSKGHESCMGAVVSEYFVLTAAHCFTVDDKEHSIKVSVGGEKRDLEIEVVLFHPNYNINGKKEAGIPEFYDYDVALIKLKNKLKYGQTIRPICLPCTEGTTRALRLPPTTTCQQQKEELLPAQDIKALFVSEEEKKLTRKEVYIKNGDKKGSCERDAQYAPGYDKVKDISEVVTPRFLCTGGVSPYADPNTCRGDSGGPLIVHKRSRFIQVGVISWGVVDVCKNQKRQKQVPAHARDFHINLFQVLPWLKEKLQDEDLGFL

SEQ ID NO: 123 - protein, 542 aa, Homo sapiens
MPLRDETLREVWASDSGHEEESLSPEAPRRPKQRPAPAQRLRKKRTEAPESPCPTGSKPRKPGAGRTGRPREEPSPDPAQARAPQTVYARFLRDPEAKKRDPRETFLVARAPDAEDEEEEEEEDEEDEEEEAEEKKEKILLPPKKPLREKSSADLKERRAKAQGPRGDLGSPDPPPKPLRVRNKEAPAGEGTKMRKTKKKGSGEADKDPSGSPASARKSPAAMFLVGEGSPDKKALKKKGTPKGARKEEEEEEEAATVIKKSNQKGKAKGKGKKKAKEERAPSPPVEVDEPREFVLRPAPQGRTVRCRLTRDKKGMDRGMYPSYFLHLDTEKKVFLLAGRKRKRSKTANYLISIDPTNLSRGGENFIGKLRSNLLGNRFTVFDNGQNPQRGYSTNVASLRQELAAVIYETNVLGFRGPRRMTVIIPGMSAENERVPIRPRNASDGLLVRWQNKTLESLIELHNKPPVWNDDSGSYTLNFQGRVTQASVKNFQIVHADDPDYIVLQFGRVAEDAFTLDYRYPLCALQAFAIALSSFDGKLACE

SEQ ID NO: 124 - protein, 201 aa, Homo sapiens
MGNVMEGKSVEELSSTECHQWYKKFMTECPSGQLTLYEFRQFFGLKNLSPSASQYVEQMFETFDFNKDGYIDFMEYVAALSLVLKGKVEQKLRWYFKLYDVDGNGCIDRDELLTIIQAIRAINPCSDTTMTAEEFTDTVFSKIDVNGDGELSLEEFIEGVQKDQMLLDTLTRSLDLTRIVRRLQNGEQDEEGADEAAEAAG

SEQ ID NO: 125 - protein, 200 aa, Homo sapiens
MGQEFSWEEAEAAGEIDVAELQEWYKKFVMECPSGTLFMHEFKRFFKVTDDEEASQYVEGMFRAFDKNGDNTIDFLEYVAALNLVLRGTLEHKLKWTFKIYDKDGNGCIDRLELLNIVEGIYQLKKACRRELQTEQGQLLTPEEVVDRIFLLVDENGDGQLSLNEFVEGARRDKWVMKMLQMDMNPSSWLAQQRRKSAMF

SEQ ID NO: 126 - protein, 346 aa, Homo sapiens
MALLKVKFDQKKRVKLAQGLWLMNWFSVLAGIIIFSLGLFLKIELRKRSDVMNNSESHFVPNSLIGMGVLSCVFNSLAGKICYDALDPAKYARWKPWLKPYLAICVLFNIILFLVALCCFLLRGSLENTLGQGLKNGMKYYRDTDTPGRCFMKKTIDMLQIEFKCCGNNGFRDWFEIQWISNRYLDFSSKEVKDRIKSNVDGRYLVDGVPFSCCNPSSPRPCIQYQITNNSAHYSYDHQTEELNLWVRGCRAALLSYYSSLMNSMGVVTLLIWLFEVTITIGLRYLQTSLDGVSNPEESESESQGWLLERSVPETWKAFLESVKKLGKGNQVEAEGADAGQAPEAG

SEQ ID NO: 127 - protein, 797 aa, Homo sapiens
MYLETRRAIFVFWIFLQVQGTKDISINIYHSETKDIDNPPRNETTESTEKMYKMSTMRRIFDLAKHRTKRSAFFPTGVKVCPQESMKQILDSLQAYYRLRVCQEAVWEAYRIFLDRIPDTGEYQDWVSICQQETFCLFDIGKNFSNSQEHLDLLQQRIKQRSFPDRKDEISAEKTLGEPGETIVISTDVANVSLGPFPLTPDDTLLNEILDNTLNDTKMPTTERETEFAVLEEQRVELSVSLVNQKFKAELADSQSPYYQELAGKSQLQMQKIFKKLPGFKKIHVLGFRPKKEKDGSSSTEMQLTAIFKRHSAEAKSPASDLLSFDSNKIESEEVYHGTMEEDKQPEIYLTATDLKRLISKALEEEQSLDVGTIQFTDEIAGSLPAFGPDTQSELPTSFAVITEDATLSPELPPVEPQLETVDGAEHGLPDTSWSPPAMASTSLSEAPPFFMASSIFSLTDQGTTDTMATDQTMLVPGLTIPTSDYSAISQLALGISHPPASSDDSRSSAGGEDMVRHLDEMDLSDTPAPSEVPELSEYVSVPDHFLEDTTPVSALQYITTSSMTIAPKGRELVVFFSLRVANMAFSNDLFNKSSLEYRALEQQFTQLLVPYLRSNLTGFKQLEILNFRNGSVIVNSKMKFAKSVPYNLTKAVHGVLEDFRSAAAQQLHLEIDSYSLNIEPADQADPCKFLACGEFAQCVKNERTEEAECRCKPGYDSQGSLDGLEPGLCGPGTKECEVLQGKGAPCRLPDHSENQAYKTSVKKFQNQQNNKVISKRNSELLTVEYEEFNHQDWEGN

SEQ ID NO: 128 - protein, 3165 aa, Homo sapiens
MTDKSIVILSLMVFHSSFINGKTCRRQLVEEWHPQPSSYVVNWTLTENICLDFYRDCWFLGVNTKIDTSGNQAVPQICPLQIQLGDILVISSEPSLQFPEINLMNVSETSFVGCVQNTTTEDQLLFGCRLKGMHTVNSKWLSVGTHYFITVMASGPSPCPLGLRLNVTVKQQFCQESLSSEFCSGHGKCLSEAWSKTYSCHCQPPFSGKYCQELDACSFKPCKNNGSCINKRENWDEQAYECVCHPPFTGKNCSEIIGQCQPHVCFHGNCSNITSNSFICECDEQFSGPFCEVSAKPCVSLLFWKRGICPNSSSAYTYECPKGSSSQNGETDVSEFSLVPCQNGTDCIKISNDVMCICSPIFTDLLCKSIQTSCESFPLRNNATCKKCEKDYPCSCISGFTEKNCEKAIDHCKLLSINCLNEEWCFNIIGRFKYVCIPGCTKNPCWFLKNVYLIHQHLCYCGVTFHGICQDKGPAQFEYVWQLGFAGSEGEKCQGVIDAYFFLAANCTEDATYVNDPEDNNSSCWFPHEGTKEICANGCSCLSEEDSQEYRYLCFLRWAGNMYLENTTDDQENECQHEAVCKDEINRPRCSCSLSYIGRLCVVNVDYCLGNHSISVHGLCLALSHNCNCSGLQRYERNICEIDTEDCKSASCKNGTTSTHLRGYFFRKCVPGFKGTQCEIDIDECASHPCKNGATCIDQPGNYFCQCVPPFKVVDGFSCLCNPGYVGIRCEQDIDDCILNACEHNSTCKDLHLSYQCVCLSDWEGNFCEQESNECKMNPCKNNSTCTDLYKSYRCECTSGWTGQNCSEEINECDSDPCMNGGLCHESTIPGQFVCLCPPLYTGQFCHQRYNLCDLLHNPCRNNSTCLALVDANQHCICREEFEGKNCEIDVKDCLFLSCQDYGDCEDMVNNFRCICRPGFSGSLCEIEINECSSEPCKNNGTCVDLTNRFFCNCEPEYHGPFCELDVNKCKISPCLDEENCVYRTDGYNCLCAPGYTGINCEINLDECLSEPCLHDGVCIDGINHYTCDCKSGFFGTHCETNANDCLSNPCLHGRCTELINEYPCSCDADGTSTQCKIKINDCTSIPCMNEGFCQKSAHGFTCICPRGYTGAYCEKSIDNCAEPELNSVICLNGGICVDGPGHTFDCRCLPGFSGQFCEININECSSSPCLHGADCEDHINGYVCKCQPGWSGHHCENELECIPNSCVHELCMENEPGSTCLCTPGFMTCSIGLLCGDEIRRITCLTPIFQRTDPISTQTYTIPPSETLVSSFPSIKATRIPAIMDTYPVDQGPKQTGIVKHDILPTTGLATLRISTPLESYLLQELIVTRELSAKHSLLSSADVSSSRFLNFGIRDPAQIVQDKTSVSHMPIRTSAATLGFFFPDRRARTPFIMSSLMSDFIFPTQSLLFENCQTVALSATPTTSVIRSIPGADIELNRQSLLSRGFLLIAASISATPVVSRGAQEDIEEYSADSLISRREHWRLLSPSMSPIFPAKVIISKQVTILNSSALHRFSTKAFNPSEYQAITEASSNQRLTNIKSQAADSLRELSQTCATCSMTEIKSSREFSDQVLHSKQSHFYETFWMNSAILASWYALMGAQTITSGHSFSSATEITPSVAFTEVPSLFPSKKSAKRTILSSSLEESITLSSNLDVNLCLDKTCLSIVPSQTISSDLMNSDLTSKMTTDELSVSENILKLLKIRQYGITMGPTEVLNQESLLDMEKSKGSHTLFKLHPSDSSLDFELNLQIYPDVTLKTYSEITHANDFKNNLPPLTGSVPDFSEVTTNVAFYTVSATPALSIQTSSSMSVIRPDWPYFTDYMTSLKKEVKTSSEWSKWELQPSVQYQEFPTASRHLPFTRSLTLSSLESILAPQRLMISDFSCVRYYGDSYLEFQNVALNPQNNISLEFQTFSSYGLLLYVKQDSNLVDGFFIQLFIENGTLKYHFYCPGEAKFKSINTTVRVDNGQKYTLLIRQELDPCNAELTILGRNTQICESINHVLGKPLPKSGSVFIGGFPDLHGKIQMPVPVKNFTGCIEVIEINNWRSFIPSKAVKNYHINNCRSQGFMLSPTASFVDASDVTQGVDTMWTSVSPSVAAPSVCQQDVCHNGGTCHAIFLSSGIVSFQCDCPLHFTGRFCEKDAGLFFPSFNGNSYLELPFLKFVLEKEHNRTVTIYLTIKTNSLNGTILYSNGNNCGKQFLHLFLVEGRPSVKYGCGNSQNILTVSANYSINTNAFTPITIRYTTPVGSPGVVCMIEMTADGKPPVQKKDTEISHASQAYFESMFLGHIPANVQIHKKAGPVYGFRGCILDLQVNNKEFFIIDEARHGKNIENCHVPWCAHHLCRNNGTCISDNENLFCECPRLYSGKLCQFASCENNPCGNGATCVPKSGTDIVCLCPYGRSGPLCTDAINITQPRFSGTDAFGYTSFLAYSRISDISFHYEFHLKFQLANNHSALQNNLIFFTGQKGHGLNGDDFLAVGLLNGSVVYSYNLGSGIASIRSEPLNLSLGVHTVHLGKFFQEGWLKVDDHKNKSIIAPGRLVGLNVFSQFYVGGYSEYTPDLLPNGADFKNGFQGCIFTLQVRTEKDGHFRGLGNPEGHPNAGRSVGQCHASPCSLMKCGNGGTCIESGTSVYCNCTTGWKGSFCTETVSTCDPEHDPPHHCSRGATCISLPHGYTCFCPLGTTGIYCEQALILIVILEKPKPAERKVKKEALSISDPSFRSNELSWMSFASFHVRKKTHIQLQFQPLAADGILFYAAQHLKAQSGDFLCISLVNSSVQLRYNLGDRTIILETLQKVTINGSTWHIIKAGRVGAEGYLDLDGINVTEKASTKMSSLDTNTDFYIGGVSSLNLVNPMAIENEPVGFQGCIRQVIINNQELQLTEFGAKGGSNVGDCDGTACGYNTCRNGGECTVNGTTFSCRCLPDWAGNTCNQSVSCLNNLCLHQSLCIPDQSFSYSCLCTLGWVGRYCENKTSFSTAKFMGNSYIKYIDPNYRMRNLQFTTISLNFSTTKTEGLIVWMGIAQNEENDFLAIGLHNQTLKIAVNLGERISVPMSYNNGTFCCNKWHHVVVIQNQTLIKAYINNSLILSEDIDPHKNFVALNYDGICYLGGFEYGRKVNIVTQEIFKTNFVGKIKDVVFFQEPKNIELIKLEGYNVYDGDEQNEVT

SEQ ID NO: 129 - protein, 921 aa, Homo sapiens
MKTCWKIPVFFFVCSFLEPWASAAVKRRPRFPVNSNSNGGNELCPKIRIGQDDLPGFDLISQFQVDKAASRRAIQRVVGSATLQVAYKLGNNVDFRIPTRNLYPSGLPEEYSFLTTFRMTGSTLKKNWNIWQIQDSSGKEQVGIKINGQTQSVVFSYKGLDGSLQTAAFSNLSSLFDSQWHKIMIGVERSSATLFVDCNRIESLPIKPRGPIDIDGFAVLGKLADNPQVSVPFELQWMLIHCDPLRPRRETCHELPARITPSQTTDERGPPGEQGPPGPPGPPGVPGIDGIDGDRGPKGPPGPPGPAGEPGKPGAPGKPGTPGADGLTGPDGSPGSIGSKGQKGEPGVPGSRGFPGRGIPGPPGPPGTAGLPGELGRVGPVGDPGRRGPPGPPGPPGPRGTIGFHDGDPLCPNACPPGRSGYPGLPGMRGHKGAKGEIGEPGRQGHKGEEGDQGELGEVGAQGPPGAQGLRGITGIVGDKGEKGARGLDGEPGPQGLPGAPGDQGQRGPPGEAGPKGDRGAEGARGIPGLPGPKGDTGLPGVDGRDGIPGMPGTKGEPGKPGPPGDAGLQGLPGVPGIPGAKGVAGEKGSTGAPGKPGQMGNSGKPGQQGPPGEVGPRGPQGLPGSRGELGPVGSPGLPGKLGSLGSPGLPGLPGPPGLPGMKGDRGVVGEPGPKGEQGASGEEGEAGERGELGDIGLPGPKGSAGNPGEPGLRGPEGSRGLPGVEGPRGPPGPRGVQGEQGATGLPGVQGPPGRAPTDQHIKQVCMRVIQEHFAEMAASLKRPDSGATGLPGRPGPPGPPGPPGENGFPGQMGIRGLPGIKGPPGALGLRGPKGDLGEKGERGPPGRGPNGLPGAIGLPGDPGPASYGRNGRDGERGPPGVAGIPGVPGPPGPPGLPGFCEPASCTMQAGQRAFNKGPDP

SEQ ID NO: 130 - protein, 1692 aa, Homo sapiens
MSSAVGPRGPRPPTVPPPMQELPDLSHLTEEERNIIMAVMDRQKEEEEKEEAMLKCVVRDMAKPAACKTPRNAENQPHQPSPRLHQQFESYKEQVRKIGEEARRYQGEHKDDAPTCGICHKTKFADGCGHLCSYCRTKFCARCGGRVSLRSNNEDKVVMWVCNLCRKQQEILTKSGAWFFGSGPQQTSQDGTLSDTATGAGSEVPREKKARLQERSRSQTPLSTAAASSQDAAPPSAPPDRSKGAEPSQQALGPEQKQASSRSRSEPPRERKKTPGLSEQNGKGALKSERKRVPKTSAQPVEGAVEERERKERRESRRLEKGRSQDYPDTPEKRDEGKAADEEKQRKEEDYQTRYRSDPNLARYPVKPPPEEQQMRMHARVSRARHERRHSDVALPRTEAGAALPEGKAGKRAPAAARASPPDSPRAYSAERTAETRAPGAKQLTNHSPPAPRHGPVPAEAPELKAQEPLRKQSRLDPSSAVLMRKAKREKVETMLRNDSLSSDQSESVRPSPPKPHRSKRGGKKRQMSVSSSEEEGVSTPEYTSCEDVELESESVSEKGDLDYYWLDPATWHSRETSPISSHPVTWQPSKEGDRLIGRVILNKRTTMPKDSGALLGLKVVGGKMTDLGRLGAFITKVKKGSLADVVGHLRAGDEVLEWNGKPLPGATNEEVYNIILESKSEPQVEIIVSRPIGDIPRIPESSHPPLESSSSSFESQKMERPSISVISPTSPGALKDAPQVLPGQLSVKLWYDKVGHQLIVNVLQATDLPARVDGRPRNPYVKMYFLPDRSDKSKRRTKTVKKILEPKWNQTFVYSHVHRRDFRERMLEITVWDQPRVQEEESEFLGEILIELETALLDDEPHWYKLQTHDESSLPLPQPSPFMPRRHIHGESSSKKLQRSQRISDSDISDYEVDDGIGVVPPVGYRSSARESKSTTLTVPEQQRTTHHRSRSVSPHRGNDQGKPRSRLPNVPLQRSLDEIHPTRRSRSPTRHHDASRSPVDHRTRDVDSQYLSEQDSELLMLPRAKRGRSAECLHTTRHLVRHYKTLPPKMPLLQSSSHWNIYSSILPAHTKTKSVTRQDISLHHECFNSTVLRFTDEILVSELQPFLDRARSASTNCLRPDTSLHSPERERGRWSPSLDRRRPPSPRIQIQHASPENDRHSRKSERSSIQKQTRKGTASDAERVLPTCLSRRGHAAPRATDQPVIRGKHPARSRSSEHSSIRTLCSMHHLVPGGSAPPSPLLTRMHRQRSPTQSPPADTSFSSRRGRQLPQVPVRSGSIEQASLVVEERTRQMKMKVHRFKQTTGSGSSQELDREQYSKYNIHKDQYRSCDNVSAKSSDSDVSDVSAISRTSSASRLSSTSFMSEQSERPRGRISSFTPKMQGRRMGTSGRSIMKSTSVSGEMYTLEHNDGSQSDTAVGTVGAGGKKRRSSLSAKVVAIVSRRSRSTSQLSQTESGHKKLKSTIQRSTETGMAAEMRKMVRQPSRESTDGSINSYSSEGNLIFPGVRLGADSQFSDFLDGLGPAQLVGRQTLATPAMGDIQIGMEDKKGQLEVEVIRARSLTQKPGSKSTPAPYVKVYLLENGACIAKKKTRIARKTLDPLYQQSLVFDESPQGKVLQVIVWGDYGRMDHKCFMGVAQILLEELDLSSMVIGWYKLFPPSSLVDPTLTPLTRRASQSSLESSTGPPCIRS

SEQ ID NO: 131 - protein, 697 aa, Homo sapiens
MGERAGSPGTDQERKAGKHHYSYLSDFETPQSSGRSSLVSSSPASVRRKNPKRQTSDGQVHHQAPRKPSPKGLPNRKGVRVGFRSQSLNREPLRKDTDLVTKRILSARLLKINELQNEVSELQVKLAELLKENKSLKRLQYRQEKALNKFEDAENEISQLIFRHNNEITALKERLRKSQEKERATEKRVKDTESELFRTKFSLQKLKEISEARHLPERDDLAKKLVSAELKLDDTERRIKELSKNLELSTNSFQRQLLAERKRAYEAHDENKVLQKEVQRLYHKLKEKERELDIKNIYSNRLPKSSPNKEKELALRKNAACQSDFADLCTKGVQTMEDFKPEEYPLTPETIMCYENKWEEPGHLTLDLQSQKQDRHGEAGILNPIMEREEKFVTDEELHVVKQEVEKLEDEWEREELDKKQKEKASLLEREEKPEWETGRYQLGMYPIQNMDKLQGEEEERLKREMLLAKLNEIDRELQDSRNLKYPVLPLLPDFESKLHSPERSPKTYRFSESSERLFNGHHLQDISFSTPKGEGQNSGNVRSPASPNEFAFGSYVPSFAKTSERSNPFSQKSSFLDFQRNSMEKLSKDGVDLITRKEKKANLMEQLFGASGSSTISSKSSDPNSVASSKGDIDPLNFLPGNKGSRDQEHDEDEGFFLSEGRSFNPNRHRLKHADDKPAVKAADSVEDEIEEVALR

SEQ ID NO: 132 - protein, 314 aa, Homo sapiens
MGLLDSEPGSVLNVVSTALNDTVEFYRWTWSIADKRVENWPLMQSPWPTLSISTLYLLFVWLGPKWMKDREPFQMRLVLIIYNFGMVLLNLFIFRELFMGSYNAGYSYICQSVDYSNNVHEVRIAAALWWYFVSKGVEYLDTVFFILRKKNNQVSFLHVYHHCTMFTLWWIGIKWVAGGQAFFGAQLNSFIHVIMYSYYGLTAFGPWIQKYLWWKRYLTMLQLIQFHVTIGHTALSLYTDCPFPKWMHWALIAYAISFIFLFLNFYIRTYKEPKKPKAGKTAMNGISANGVSKSEKQLMIENGKKQKNGKAKGD

SEQ ID NO: 133 - protein, 707 aa, Homo sapiens
MHGAARAPATSVSADCCIPAGLRLGPVPGTFKLGKYLSDRREPGPKKKVRMVRGELVDESGGSPLEWIGLIRAARNSQEQTLEAIADLPGGQIFYRALRDVQPGEELTVWYSNSLAQWFDIPTTATPTHDEKGEERYICWYCWRTFRYPNSLKAHLRFHCVFSGGGGGAFLHHEHAARQGAVPAADGLGLSPKPPAPDFAAPSQAGTLRPHPLGPPPVQACGAREGIKREASSAPSATSPTPGKWGQPKKGKEQLDRALDMSGAARGQGHFLGIVGGSSAGVGSLAFYPGVRSAFKPAGLARAAAAAHGDPYREESSSKQGAGLALGRLLGGGRACGRPGSGENSAAGGAGHHHHHHAHHHHHPKCLLAGDPPPPPPPGLPCSGALRGFPLLSVPPEEASAFKHVERAPPAAAALPGARYAQLPPAPGLPLERCALPPLDPGGLKAYPGGECSHLPAVMPAFTVYNGELLYGSPATTAYYPLKLHFGGLLKYPESISYFSGPAAAALSPAELGSLASIDREIAMHNQQLSEMAAGKGRGRLDSGTLPPAVAAAGGTGGGGSGGSGAGKPKTGHLCLYCGKLYSRKYGLKIHMRTHTGYKPLKCKVCLRPFGDPSNLNKHIRLHAEGNTPYRCEFCGKVLVRRRDLERHVKSRHPGQSLLAKAGDGPGAEPGYPPEPGDPKSDDSDVDVCFTDDQSDPEVGGGGERDL

SEQ ID NO: 134 - protein, 396 aa, Homo sapiens
MEFLKTCVLRRNACTAVCFWRSKVVQKPSVRRISTTSPRSTVMPAWVIDKYGKNEVLRFTQNMMMPIIHYPNEVIVKVHAASVNPIDVNMRSGYGATALNMKRDPLHVKIKGEEFPLTLGRDVSGVVMECGLDVKYFKPGDEVWAAVPPWKQGTLSEFVVVSGNEVSHKPKSLTHTQAASLPYVALTAWSAINKVGGLNDKNCTGKRVLILGASGGVGTFAIQVMKAWDAHVTAVCSQDASELVRKLGADDVIDYKSGSVEEQLKSLKPFDFILDNVGGSTETWAPDFLKKWSGATYVTLVTPFLLNMDRLGIADGMLQTGVTVGSKALKHFWKGVHYRWAFFMASGPCLDDIAELVDAGKIRPVIEQTFPFSKVPEAFLKVERGHARGKTVINVV

SEQ ID NO: 135 - protein, 1196 aa, Homo sapiens
MPTAESEAKVKTKVRFEELLKTHSDLMREKKKLKKKLVRSEENISPDTIRSNLHYMKETTSDDPDTIRSNLPHIKETTSDDVSAANTNNLKKSTRVTKNKLRNTQLATENPNGDASVEEDKQGKPNKKVIKTVPQLTTQDLKPETPENKVDSTHQKTHTKPQPGVDHQKSEKANEGREETDLEEDEELMQAYQCHVTEEMAKEIKRKIRKKLKEQLTYFPSDTLFHDDKLSSEKRKKKKEVPVFSKAETSTLTISGDTVEGEQKKESSVRSVSSDSHQDDEISSMEQSTEDSMQDDTKPKPKKTKKKTKAVADNNEDVDGDGVHEITSRDSPVYPKCLLDDDLVLGVYIHRTDRLKSDFMISHPMVKIHVVDEHTGQYVKKDDSGRPVSSYYEKENVDYILPIMTQPYDFKQLKSRLPEWEEQIVFNENFPYLLRGSDESPKVILFFEILDFLSVDEIKNNSEVQNQECGFRKIAWAFLKLLGANGNANINSKLRLQLYYPPTKPRSPLSVVEAFEWWSKCPRNHYPSTLYVTVRGLKVPDCIKPSYRSMMALQEEKGKPVHCERHHESSSVDTEPGLEESKEVIKWKRLPGQACRIPNKHLFSLNAGERGCFCLDFSHNGRILAAACASRDGYPIILYEIPSGRFMRELCGHLNIIYDLSWSKDDHYILTSSSDGTARIWKNEINNTNTFRVLPHPSFVYTAKFHPAVRELVVTGCYDSMIRIWKVEMREDSAILVRQFDVHKSFINSLCFDTEGHHMYSGDCTGVIVVWNTYVKINDLEHSVHHWTINKEIKETEFKGIPISYLEIHPNGKRLLIHTKDSTLRIMDLRILVARKFVGAANYREKIHSTLTPCGTFLFAGSEDGIVYVWNPETGEQVAMYSDLPFKSPIRDISYHPFENMVAFCAFGQNEPILLYIYDFHVAQQEAEMFKRYNGTFPLPGIHQSQDALCTCPKLPHQGSFQIDEFVHTESSSTKMQLVKQRLETVTEVIRSCAAKVNKNLSFTSPPAVSSQQSKLKQSNMLTAQEILHQFGFTQTGIISIERKPCNHQVDTAPTVVALYDYTANRSDELTIHRGDIIRVFFKDNEDWWYGSIGKGQEGYFPANHVASETLYQELPPEIKERSPPLSPEEKTKIEKSPAPQKQSINKNKSQDFRLGSESMTHSEMRKEQSHEDQGHIMDTRMRKNKQAGRKVTLIE

SEQ ID NO: 136 - protein, 323 aa, Homo sapiens
MSAVCGGAARMLRTPGRHGYAAEFSPYLPGRLACATAQHYGIAGCGTLLILDPDEAGLRLFRSFDWNDGLFDVTWSENNEHVLITCSGDGSLQLWDTAKAAGPLQVYKEHAQEVYSVDWSQTRGEQLVVSGSWDQTVKLWDPTVGKSLCTFRGHESIIYSTIWSPHIPGCFASASGDQTLRIWDVKAAGVRIVIPAHQAEILSCDWCKYNENLLVTGAVDCSLRGWDLRNVRQPVFELLGHTYAIRRVKFSPFHASVLASCSYDFTVRFWNFSKPDSLLETVEHHTEFTCGLDFSLQSPTQVADCSWDETIKIYDPACLTIPA

SEQ ID NO: 137 - protein, 299 aa, Homo sapiens
MHSLATAAPVPTTLAQVDREKIYQWINELSSPETRENALLELSKKRESVPDLAPMLWHSFGTIAALLQEIVNIYPSINPPTLTAHQSNRVCNALALLQCVASHPETRSAFLAAHIPLFLYPFLHTVSKTRPFEYLRLTSLGVIGALVKTDEQEVINFLLTTEIIPLCLRIMESGSELSKTVATFILQKILLDDTGLAYICQTYERFSHVAMILGKMVLQLSKEPSARLLKHVVRCYLRLSDNPRAREALRQCLPDQLKDTTFAQVLKDDTTTKRWLAQLVKNLQEGQVTDPRGIPLPPQ

SEQ ID NO: 138 - protein, 848 aa, Homo sp.
MNSSSANITYASRKRRKPVQKTVKPIPAEGIKSNPSKRHRDRLNTELDRLASLLPFPQDVINKLDKLSVLRLSVSYLRAKSFFDVALKSSPTERNGGQDNCRAANFREGLNLQEGEFLLQALNGFVLVVTTDALVFYASSTIQDYLGFQQSDVIHQSVYELIHTEDRAEFQRQLHWALNPSQCTESGQGIEEATGLPQTVVCYNPDQIPPENSPLMERCFICRLRCLLDNSSGFLAMNFQGKLKYLHGQKKKGKDGSILPPQLALFAIATPLQPPSILEIRTKNFIFRTKHKLDFTPIGCDAKGRIVLGYTEAELCTRGSGYQFIHAADMLYCAESHIRMIKTGESGMIVFRLLTKNNRWTWVQSNARLLYKNGRPDYIIVTQRPLTDEEGTEHLRKRNTKLPFMFTTGEAVLYEATNPFPAIMDPLPLRTKNGTSGKDSATTSTLSKDSLNPSSLLAAMMQQDESIYLYPASSTSSTAPFENNFFNESMNECRNWQDNTAPMGNDTILKHEQIDQPQDVNSFAGGHPGLFQDSKNSDLYSIMKNLGIDFEDIRHMQNEKFFRNDFSGEVDFRDIDLTDEILTYVQDSLSKSPFIPSDYQQQQSLALNSSCMVQEHLHLEQQQQHHQKQVVVEPQQQLCQKMKHMQVNGMFENWNSNQFVPFNCPQQDPQQYNVFTDLHGISQEFPYKSEMDSMPYTQNFISCNQPVLPQHSKCTELDYPMGSFEPSPYPTTSSLEDFVTCLQLPENQKHGLNPQSAIITPQTCYAGAVSMYQCQPEPQHTHVGQMQYNPVLPGQQAFLNKFQNGVLNETYPAELNNINNTQTTTHLQPLHHPSEARPFPDLTSSGFL

SEQ ID NO: 139 - protein, 586 aa, Homo sapiens
MAASGVEKSSKKKTEKKLAAREEAKLLAGFMGVMNNMRKQKTLCDVILMVQERKIPAHRVVLAAASHFFNLMFTTNMLESKSFEVELKDAEPDIIEQLVEFAYTARISVNSNNVQSLLDAANQYQIEPVKKMCVDFLKEQVDASNCLGISVLAECLDCPELKATADDFIHQHFTEVYKTDEFLQLDVKRVTHLLNQDTLTVRAEDQVYDAAVRWLKYDEPNRQPFMVDILAKVRFPLISKNFLSKTVQAEPLIQDNPECLKMVISGMRYHLLSPEDREELVDGTRPRRKKHDYRIALFGGSQPQSCRYFNPKDYSWTDIRCPFEKRRDAACVFWDNVVYILGGSQLFPIKRMDCYNVVKDSWYSKLGPPTPRDSLAACAAEGKIYTSGGSEVGNSALYLFECYDTRTESWHTKPSMLTQRCSHGMVEANGLIYVCGGSLGNNVSGRVLNSCEVYDPATETWTELCPMIEARKNHGLVFVKDKIFAVGGQNGLGGLDNVEYYDIKLNEWKMVSPMPWKGVTVKCAAVGSIVYVLAGFQGVGRLGHILEYNTETDKWVANSKVRAFPVTSCLICVVDTCGANEETLET

SEQ ID NO: 140 - protein, 221 aa, Homo sapiens
MSSRPGREDVGAAGARRPREPPEQELQRRREQKRRRHDAQQLQQLKHLESFYEKPPPGLIKEDETKPEDCIPDVPGNEHAREFLAHAPTKGLWMPLGKEVKVMQCWRCKRYGHRTGDKECPFFIKGNQKLEQFRVAHEDPMYDIIRDNKRHEKDVRIQQLKQLLEDSTSDEDRSSSSSSEGKEKHKKKKKKEKHKKRKKEKKKKKKRKHKSSKSNEGSDSE

SEQ ID NO: 141 - protein, 887 aa, Homo sapiens
MSLFKARDWWSTILGDKEEFDQGCLCLANVDNSGNGQDKIIVGSFMGYLRIFSPHPAKTGDGAQAEDLLLEVDLRDPVLQVEVGKFVSGTEMLHLAVLHSRKLCVYSVSGTLGNVEHGNQCQMKLMYEHNLQRTACNMTYGSFGGVKGRDLICIQSMDGMLMVFEQESYAFGRFLPGFLLPGPLAYSSRTDSFLTVSSCQQVESYKYQVLAFATDADKRQETEQQKLGSGKRLVVDWTLNIGEQALDICIVSFNQSASSVFVLGERNFFCLKDNGQIRFMKKLDWSPSCFLPYCSVSEGTINTLIGNHNNMLHIYQDVTLKWATQLPHIPVAVRVGCLHDLKGVIVTLSDDGHLQCSYLGTDPSLFQAPNVQSRELNYDELDVEMKELQKIIKDVNKSQGVWPMTEREDDLNVSVVVSPNFDSVSQATDVEVGTDLVPSVTVKVTLQNRVILQKAKLSVYVQPPLELTCDQFTFEFMTPDLTRTVSFSVYLKRSYTPSELEGNAVVSYSRPTDRNPDGIPRVIQCKFRLPLKLICLPGQPSKTASHKITIDTNKSPVSLLSLFPGFASQSDDDQVNVMGFHFLGGARITVLASKTSQRYRIQSEQFEDLWLITNELILRLQEYFEKQGVKDFACSFSGSIPLQEYFELIDHHFELRINGEKLEELLSERAVQFRAIQRRLLARFKDKTPAPLQHLDTLLDGTYKQVIALADAVEENQGNLFQSFTRLKSATHLVILLIALWQKLSADQVAILEAAFLPLQEDTQELGWEETVDAAISHLLKTCLSKSSKEQALNLNSQLNIPKDTSQLKKHITLLCDRLSKGGRLCLSTDAAAPQTMVMPGGCTTIPESDLEERSVEQDSTELFTNHRHLTAETPRPEVSPLQGVSE

SEQ ID NO: 142 - protein, 1283 aa, Homo sapiens
MWGSDRLAGAGGGGAAVTVAFTNARDCFLHLPRRLVAQLHLLQNQAIEVVWSHQPAFLSWVEGRHFSDQGENVAEINRQVGQKLGLSNGGQVFLKPCSHVVSCQQVEVEPLSADDWEILELHAVSLEQHLLDQIRIVFPKAIFPVWVDQQTYIFIQIVALIPAASYGRLETDTKLLIQPKTRRAKENTFSKADAEYKKLHSYGRDQKGMMKELQTKQLQSNTVGITESNENESEIPVDSSSVASLWTMIGSIFSFQSEKKQETSWGLTEINAFKNMQSKVVPLDNIFRVCKSQPPSIYNASATSVFHKHCAIHVFPWDQEYFDVEPSFTVTYGKLVKLLSPKQQQSKTKQNVLSPEKEKQMSEPLDQKKIRSDHNEEDEKACVLQVVWNGLEELNNAIKYTKNVEVLHLGKVWIPDDLRKRLNIEMHAVVRITPVEVTPKIPRSLKLQPRENLPKDISEEDIKTVFYSWLQQSTTTMLPLVISEEEFIKLETKDGLKEFSLSIVHSWEKEKDKNIFLLSPNLLQKTTIQVLLDPMVKEENSEEIDFILPFLKLSSLGGVNSLGVSSLEHITHSLLGRPLSRQLMSLVAGLRNGALLLTGGKGSGKSTLAKAICKEAFDKLDAHVERVDCKALRGKRLENIQKTLEVAFSEAVWMQPSVVLLDDLDLIAGLPAVPEHEHSPDAVQSQRLAHALNDMIKEFISMGSLVALIATSQSQQSLHPLLVSAQGVHIFQCVQHIQPPNQEQRCEILCNVIKNKLDCDINKFTDLDLQHVAKETGGFVARDFTVLVDRAIHSRLSRQSISTREKLVLTTLDFQKALRGFLPASLRSVNLHKPRDLGWDKIGGLHEVRQILMDTIQLPAKYPELFANLPIRQRTGILLYGPPGTGKTLLAGVIARESRMNFISVKGPELLSKYIGASEQAVRDIFIRAQAAKPCILFFDEFESIAPRRGHDNTGVTDRVVNQLLTQLDGVEGLQGVYVLAATSRPDLIDPALLRPGRLDKCVYCPPPDQVSRLEILNVLSDSLPLADDVDLQHVASVTDSFTGADLKALLYNAQLEALHGMLLSSGLQDGSSSSDSDLSLSSMVFLNHSSGSDDSAGDGECGLDQSLVSLEMSEILPDESKFNMYRLYFGSSYESELGNGTSSDLSSQCLSAPSSMTQDLPGVPGKDQLFSQPPVLRTASQEGCQELTQEQRDQLRADISIIKGRYRSQSGEDESMNQPGPIKTRLAISQSHLMTALGHTRPSISEDDWKNFAELYESFQNPKRRKNQSGTMFRPGQKVTLA

SEQ ID NO: 143 - protein, 305 aa, Homo sapiens
MAREDSVKCLRCLLYALNLLFWLMSISVLAVSAWMRDYLNNVLTLTAETRVEEAVILTYFPVVHPVMIAVCCFLIIVGMLGYCGTVKRNLLLLAWYFGSLLVIFCVELACGVWTYEQELMVPVQWSDMVTLKARMTNYGLPRYRWLTHAWNFFQREFKCCGVVYFTDWLEMTEMDWPPDSCCVREFPGCSKQAHQEDLSDLYQEGCGKKMYSFLRGTKQLQVLRFLGISIGVTQILAMILTITLLWALYYDRREPGTDQMMSLKNDNSQHLSCPSVELLKPSLSRIFEHTSMANSFNTHFEMEEL

SEQ ID NO: 144 - protein, 563 aa, Homo sapiens
MEGPLTPPPLQGGGAAAVPEPGARQHPGHETAAQRYSARLLQAGYEPESMADYLISGGTGYVPEDGLTAQQLFASADGLTYNDFLILPGFIDFIADEVDLTSALTRKITLKTPLISSPMDTVTEADMAIAMALMGGIGFIHHNCTPEFQANEVRKVKKFEQGFITDPVVLSPSHTVGDVLEAKMRHGFSGIPITETGTMGSKLVGIVTSRDIDFLAEKDHTTLLSEVMTPRIELVVAPAGVTLKEANEILQRSKKGKLPIVNDCDELVAIIARTDLKKNRDYPLASKDSQKQLLCGAAVGTREDDKYRLDLLTQAGVDVIVLDSSQGNSVYQIAMVHYIKQKYPHLQVIGGNVVTAAQAKNLIDAGVDGLRVGMGCGSICITQEVMACGRPQGTAVYKVAEYARRFGVPIIADGGIQTVGHVVKALALGASTVMMGSLLAATTEAPGEYFFSDGVRLKKYRGMGSLDAMEKSSSSQKRYFSEGDKVKIAQGVSGSIQDKGSIQKFVPYLIAGIQHGCQDIGARSLSVLRSMMYSGELKFEKRTMSAQIEGGVHGLHSYEKRLY

SEQ ID NO: 145 - protein, 345 aa, Homo sapiens
MSEEEFYLFKNISSVGPWDGPQYHIAPVWAFYLQAAFMGTVFLIGFPLNAMVLVATLRYKKLRQPLNYILVNVSFGGFLLCIFSVFPVFVASCNGYFVFGRHVCALEGFLGTVAGLVTGWSLAFLAFERYIVICKPFGNFRFSSKHALTVVLATWTIGIGVSIPPFFGWSRFIPEGLQCSCGPDWYTVGTKYRSESYTWFLFIFCFIVPLSLICFSYTQLLRALKAVAAQQQESATTQKAEREVSRMVVVMVGSFCVCYVPYAAFAMYMVNNRNHGLDLRLVTIPSFFSKSACIYNPIIYCFMNKQFQACIMKMVCGKAMTDESDTCSSQKTEVSTVSSTQVGPN

SEQ ID NO: 146 - protein, 1950 aa, Homo sapiens
MPGARRRRRGAAMEGKPRAGVALAPGPSGRRPSARCARRRRPGLLLPGLWLLLLARPASCAPDELSPEQHNLSLYSMELVLKKSTGHSAAQVALTETAPGSQHSSPLHVTAPPSATTFDTAFFNQGKQTKSTADPSIFVATYVSVTSKEVAVNDDEMDNFLPDTHWTTPRMVSPIQYITVSPPGLPREALEPMLTPSLPMVSLQDEEVTSGWQNTTRQPAAYAESASHFHTFRSAFRTSEGIVPTPGRNLVLYPTDAYSHLSSRTLPEIVASLTEGVETTLFLSSRSLMPQPLGDGITIPLPSLGEVSQPPEEVWATSADRYTDVTTVLSQSLEETISPRTYPTVTASHAALAFSRTHSPLLSTPLAFASSASPTDVSSNPFLPSDSSKTSELHSNSALPGPVDNTHILSPVSSFRPYTWCAACTVPSPQQVLATSLMEKDVGSGDGAETLCMTVLEESSISLMSSVVADFSEFEEDPQVFNTLFPSRPIVPLSSRSMEISETSVGISAEVDMSSVTTTQVPPAHGRLSVPASLDPTAGSLSVAETQVTPSSVTTAFFSVITSILLDSSFSVIANKNTPSLAVRDPSVFTPYSLVPSVESSLFSDQERSSFSEHKPRGALDFASSFFSTPPLELSGSISSPSEAPASLSLMPSDLSPFTSQSFSPLVETFTLFDSSDLQSSQLSLPSSTNLEFSQLQPSSELPLNTIMLLPSRSEVSPWSSFPSDSLEFVEASTVSLTDSEAHFTSAFIETTSYLESSLISHESAVTALVPPGSESFDILTAGIQATSPLTTVHTTPILTESSLFSTLTPPDDQISALDGHVSVLASFSKAIPTGTVLITDAYLPSGSSFVSEATPFPLPTELTVVGPSLTPTEVPLNTSTEVSTTSTGAATGGPLDSTLMGDAASQSPPESSAAPPLPSLRPVTAFTLEATVDTPTLATAKPPYVCDITVPDAYLITTVLARRAVQEYIITAIKEVLRIHFNRAVELKVYELFTDFTFLVTSGPFVYTAISVINVLINSKLVRDQTPLILSVKPSFLVPESRFQVQTVLQFVPPSVDTGFCNFTQRIEKGLMTALFEVRKHHQGTYNLTVQILNITISSSRVTPRRGPVNIIFAVKSTQGFLNGSEVSELLRNLSVVEFSFYLGYPVLQIAEPFQYPQLNLSQLLKSSWVRTVLLGVMEKQLQNEVFQAEMERKLAQLLSEVSTRRRMWRRATVAAGNSVVQVVNVSRLEGDDNPVQLIYFVEDQDGERLSAVKSSDLINKMDLQRAAIILGYRIQGVIAQPVDRVKRPSPESQSNNLWVIVGVVIPVLVVMVIVVILYWKLCRTDKLDFQPDTVANIQQRQKLQIPSVKGFDFAKQHLGQHNKDDILIIHEPAPLPGPLKDHTTPSENGDVPSPKSKIPSKNVRHRGRVSPSDADSTVSEESSERDAGDKTPGAVNDGRSHRAPQSGPPLPSSGNEQHSSASIFEHVDRISRPPEASRRVPSKIQLIAMQPIPAPPVQRPSPADRVAESNKINKEIQTALRHKSEIEHHRNKIRLRAKRRGHYEFPVVDDLSSGDTKERHRVYRRAQMQIDKILDPTASVPSVFIEPRKSSRIKRSPKPRRKHQVNGCPADAEKDRLITTDSDGTYRRPPGVHNSAYIGCPSDPDLPADVQTPSSVELGRYPALPFPASQYIPPQPSIEEARQTMHSLLDDAFALVAPSSQPASTAGVGPGVPPGLPANSTPSQEERRATQWGSFYSPAQTANNPCSRYEDYGMTPPTGPLPRPGFGPGLLQSTELVPPDPQQPQASAEAPFAARGIYSEEMPSVARPRPVGGTTGSQIQHLTQVGIASRIGAQPVEIPPSRGSQYGGPGWPSYGEDEAGRREATHMLGHQEYSSSPLFQVPRTSGREPSAPSGNLPHRGLQGPGLGYPTSSTEDLQPGHSSASLIKAIREELLRLSQKQSTVQNFHS

SEQ ID NO: 147 - protein, 2400 aa, Homo sapiens
MNSTPRNAQAPSHRECFLPSVARTPSVTKVTPAKKITFLKRGDPRFAGVRLAVHQRAFKTFSALMDELSQRVPLSFGVRSVTTPRGLHSLSALEQLEDGGCYLCSDKKPPKTPSGPGRPQERNPTAQQLRDVEGQREAPGTSSSRKSLKTPRRILLIKNMDPRLQQTVVLSHRNTRNLAAFLGKASDLLRFPVKQLYTTSGKKVDSLQALLHSPSVLVCAGHEAFRTPAMKNARRSEAETLSGLTSRNKNGSWGPKTKPSVIHSRSPPGSTPRLPERPGPSNPPVGPAPGRHPQDTPAQSGPLVAGDDMKKKVRMNEDGSLSVEMKVRFHLVGEDTLLWSRRMGRASALTAASGEDPVLGEVDPLCCVWEGYPWGFSEPGVWGPRPCRVGCREVFGRGGQPGPKYEIWTNPLHASQGERVAARKRWGLAQHVRCSGLWGHGTAGRERCSQDSASPASSTGLPEGSEPESSCCPRTPEDGVDSASPSAQIGAERKAGGSLGEDPGLCIDGAGLGGPEQGGRLTPRARSEEGASSDSSASTGSHEGSSEWGGRPQGCPGKARAETSQQEASEGGDPASPALSLSSLRSDDLQAETQGQGTEQATGAAVTREPLVLGLSCSWDSEGASSTPSTCTSSQQGQRRHRSRASAMSSPSSPGLGRVAPRGHPRHSHYRKDTHSPLDSSVTKQVPRPPERRRACQDGSVPRYSGSSSSTRTQASGNLRPPSSGSLPSQDLLGTSSATVTPAVHSDFVSGVSPHNAPSAGWAGDAGSRTCSPAPIPPHTSDSCSKSGAASLGEEARDTPQPSSPLVLQVGRPEQGAVGPHRSHCCSQPGTQPAQEAQRGPSPEASWLCGRYCPTPPRGRPCPQRRSSSCGSTGSSHQSTARGPGGSPQEGTRQPGPTPSPGPNSGASRRSSASQGAGSRGLSEEKTLRSGGGPQGQEEASGVSPSSLPRSSPEAVVREWLDNIPEEPILMTYELADETTGAAGGGLRGPEVDPGDDHSLEGLGEPAQAGQQSLEGDPGQDPEPEGALLGSSDTGPQSGEGVPQGAAPEGVSEAPAEAGADREAPAGCRVSLRALPGRVSASTQIMRALMGSKQGRPSSVPEVSRPMARRLSCSAGALITCLASLQLFEEDLGSPASKVRFKDSPRYQELLSISKDLWPGCDVGEDQLDSGLWELTWSQALPDLGSHAMTENFTPTSSSGVDISSGSGGSGESSVPCAMDGTLVTQGTELPLKTSNQRPDSRTYESPGDLENQQQCCFPTFLNARACACATNEDEAERDSEEQRASSNLEQLAENTVQEEVQLEETKEGTEGEGLQEEAVQLEETKTEEGLQEEGVQLEETKETEGEGQQEEEAQLEEIEETGGEGLQEEGVQLEEVKEGPEGGLQGEALEEGLKEEGLPEEGSVHGQELSEASSPDGKGSQEDDPVQEEEAGRASASAEPCPAEGTEEPTEPPSHLSETDPSASERQSGSQLEPGLEKPPGATMMGQEHTQAQPTQGAAERSSSVACSAALDCDPIWVSVLLKKTEKAFLAHLASAVAELRARWGLQDNDLLDQMAAELQQDVAQRLQDSTKRELQKLQGRAGRMVLEPPREALTGELLLQTQQRRHRLRGLRNLSAFSERTLGLGPLSFTLEDEPALSTALGSQLGEEAEGEEFCPCEACVRKKVSPMSPKATMGATRGPIKEAFDLQQILQRKRGEHTDGEAAEVAPGKTHTDPTSTRTVQGAEGGLGPGLSQGPGVDEGEDGEGSQRLNRDKDPKLGEAEGDAMAQEREGKTHNSETSAGSELGEAEQEGEGISERGETGGQGSGHEDNLQGEAAAGGDQDPGQSDGAEGIEAPEAEGEAQPESEGVEAPEAEGDAQEAEGEAQPESEDVEAPEAEGEAQPESEDVETPEAEWEVQPESEGAEAPEAEKEAQPETESVEALETEGEDEPESEGAEAQEAEEAAQEAEGQTQPESEVIESQEAEEEAQPESEDVEALEVEVETQEAEGEAQPESEDVEAPEAEGEMQEAEEEAQPESDGVEAQPKSEGEEAQEVEGETQKTEGDAQPESDGVEAPEAEEEAQEAEGEVQEAEGEAHPESEDVDAQEAEGEAQPESEGVEAPEAEGEAQKAEGIEAPETEGEAQPESEGIEAPEAEGEAQPESEGVEAQDAEGEAQPESEGIEAQEAEEEAQPELEGVEAPEAEGEAQPESEGIEAPEAEGEAQPELEGVEAPEAEEEAQPEPEGVETPEAEGEAQPESEGETQGEKKGSPQVSLGDGQSEEASESSSPVPEDRPTPPPSPGGDTPHQRPGSQTGPSSSRASSWGNCWQKDSENDHVLGDTRSPDAKSTGTPHAERKATRMYPESSTSEQEEAPLGSRTPEQGASEGYDLQEDQALGSLAPTEAVGRADGFGQDDLDF

SEQ ID NO: 148 - protein, 819 aa, Homo sapiens
MGSGARFPSGTLRVRWLLLLGLVGPVLGAARPGFQQTSHLSSYEIITPWRLTRERREAPRPYSKQVSYVIQAEGKEHIIHLERNKDLLPEDFVVYTYNKEGTLITDHPNIQNHCHYRGYVEGVHNSSIALSDCFGLRGLLHLENASYGIEPLQNSSHFEHIIYRMDDVYKEPLKCGVSNKDIEKETAKDEEEEPPSMTQLLRRRRAVLPQTRYVELFIVVDKERYDMMGRNQTAVREEMILLANYLDSMYIMLNIRIVLVGLEIWTNGNLINIVGGAGDVLGNFVQWREKFLITRRRHDSAQLVLKKGFGGTAGMAFVGTVCSRSHAGGINVFGQITVETFASIVAHELGHNLGMNHDDGRDCSCGAKSCIMNSGASGSRNFSSCSAEDFEKLTLNKGGNCLLNIPKPDEAYSAPSCGNKLVDAGEECDCGTPKECELDPCCEGSTCKLKSFAECAYGDCCKDCRFLPGGTLCRGKTSECDVPEYCNGSSQFCQPDVFIQNGYPCQNNKAYCYNGMCQYYDAQCQVIFGSKAKAAPKDCFIEVNSKGDRFGNCGFSGNEYKKCATGNALCGKLQCENVQEIPVFGIVPAIIQTPSRGTKCWGVDFQLGSDVPDPGMVNEGTKCGAGKICRNFQCVDASVLNYDCDVQKKCHGHGVCNSNKNCHCENGWAPPNCETKGYGGSVDSGPTYNEMNTALRDGLLVFFFLIVPLIVCAIFIFIKRDQLWRSYFRKKRSQTYESDGKNQANPSRQPGSVPRHVSPVTPPREVPIYANRFAVPTYAAKQPQQFPSRPPPPQPKVSSQGNLIPARPAPAPPLYSSLT

SEQ ID NO: 149 - protein, 635 aa, Homo sapiens
MSGAGRALAALLLAASVLSAALLAPGGSSGRDAQAAPPRDLDKKRHAELKMDQALLLIHNELLWTNLTVYWKSECCYHCLFQVLVNVPQSPKAGKPSAAAASVSTQHGSILQLNDTLEEKEVCRLEYRFGEFGNYSLLVKNIHNGVSEIACDLAVNEDPVDSNLPVSIAFLIGLAVIIVISFLRLLLSLDDFNNWISKAISSRETDRLINSELGSPSRTDPLDGDVQPATWRLSALPPRLRSVDTFRGIALILMVFVNYGGGKYWYFKHASWNGLTVADLVFPWFVFIMGSSIFLSMTSILQRGCSKFRLLGKIAWRSFLLICIGIIIVNPNYCLGPLSWDKVRIPGVLQRLGVTYFVVAVLELLFAKPVPEHCASERSCLSLRDITSSWPQWLLILVLEGLWLGLTFLLPVPGCPTGYLGPGGIGDFGKYPNCTGGAAGYIDRLLLGDDHLYQHPSSAVLYHTEVAYDPEGILGTINSIVMAFLGVQAGKILLYYKARTKDILIRFTAWCCILGLISVALTKVSENEGFIPVNKNLWSLSYVTTLSSFAFFILLVLYPVVDVKGLWTGTPFFYPGMNSILVYVGHEVFENYFPFQWKLKDNQSHKEHLTQNIVATALWVLIAYILYRKKIFWKI

SEQ ID NO: 150 - protein, 2156 aa, Homo sapiens
MSDTPSTGFSIIHPTSSEGQVPPPRHLSLTHPVVAKRISFYKSGDPQFGGVRVVVNPRSFKSFDALLDNLSRKVPLPFGVRNISTPRGRHSITRLEELEDGESYLCSHGRKVQPVDLDKARRRPRPWLSSRAISAHSPPHPVAVAAPGMPRPPRSLVVFRNGDPKTRRAVLLSRRVTQSFEAFLQHLTEVMQRPVVKLYATDGRRVPSLQAVILSSGAVVAAGREPFKPGNYDIQKYLLPARLPGISQRVYPKGNAKSESRKISTHMSSSSRSQIYSVSSEKTHNNDCYLDYSFVPEKYLALEKNDSQNLPIYPSEDDIEKSIIFNQDGTMTVEMKVRFRIKEEETIKWTTTVSKTGPSNNDEKSEMSFPGRTESRSSGLKLAACSFSADVSPMERSSNQEGSLAEEINIQMTDQVAETCSSASWENATVDTDIIQGTQDQAKHRFYRPPTPGLRRVRQKKSVIGSVTLVSETEVQEKMIGQFSYSEERESGENKSEYHMFTHSCSKMSSVSNKPVLVQINNNDQMEESSLERKKENSLLKSSAISAGVIEITSQKMLEMSHNNGLPSTISNNSIVEEDVVDCVVLDNKTGIKNFKTYGNTNDRFSPISADATHFSSNNSGTDKNISEAPASEASSTVTARIDRLINEFAQCGLTKLPKNEKKILSSVASKKKKKSRQQAINSRYQDGQLATKGILNKNERINTKGRITKEMIVQDSDSPLKGGILCEEDLQKSDTVIESNTFCSKSNLNSTISKNFHRNKLNTTQNSKVQGLLTKRKSRSLNKISLGAPKKREIGQRDKVFPHNESKYCKSTFENKSLFHVFNILEQKPKDFYAPQSQAEVASGYLRGMAKKSLVSKVTDSHITLKSQKKRKGDKVKASAILSKQHATTRANSLASLKKPDFPEAIAHHSIQNYIQSWLQNINPYPTLKPIKSAPVCRNETSVVNCSNNSFSGNDPHTNSGKISNFVMESNKHITKIAGLTGDNLCKEGDKSFIANDTGEEDLHETQVGSLNDAYLVPLHEHCTLSQSAINDHNTKSHIAAEKSGPEKKLVYQEINLARKRQSVEAAIQVDPIEEETPKDLLPVLMLHQLQASVPGIHKTQNGVVQMPGSLAGVPFHSAICNSSTNLLLAWLLVLNLKGSMNSFCQVDAHKATNKSSETLALLEILKHIAITEEADDLKAAVANLVESTTSHFGLSEKEQDMVPIDLSANCSTVNIQSVPKCSENERTQGISSLDGGCSASEACAPEVCVLEVTCSPCEMCTVNKAYSPKETCNPSDTFFPSDGYGVDQTSMNKACFLGEVCSLTDTVFSDKACAQKENHTYEGACPIDETYVPVNVCNTIDFLNSKENTYTDNLDSTEELERGDDIQKDLNILTDPEYKNGFNTLVSHQNVSNLSSCGLCLSEKEAELDKKHSSLDDFENCSLRKFQDENAYTSFDMEEPRTSEEPGSITNSMTSSERNISELESFEELENHDTDIFNTVVNGGEQATEELIQEEVEASKTLELIDISSKNIMEEKRMNGIIYEIISKRLATPPSLDFCYDSKQNSEKETNEGETKMVKMMVKTMETGSYSESSPDLKKCIKSPVTSDWSDYRPDSDSEQPYKTSSDDPNDSGELTQEKEYNIGFVKRAIEKLYGKADIIKPSFFPGSTRKSQVCPYNSVEFQCSRKASLYDSEGQSFGSSEQVSSSSSMLQEFQEERQDKCDVSAVRDNYCRGDIVEPGTKQNDDSRILTDIEEGVLIDKGKWLLKENHLLRMSSENPGMCGNADTTSVDTLLDNNSSEVPYSHFGNLAPGPTMDELSSSELEELTQPLELKCNYFNMPHGSDSEPFHEDLLDVRNETCAKERIANHHTEEKGSHQSERVCTSVTHSFISAGNKVYPVSDDAIKNQPLPGSNMIHGTLQEADSLDKLYALCGQHCPILTVIIQPMNEEDRGFAYRKESDIENFLGFYLWMKIHPYLLQTDKNVFREENNKASMRQNLIDNAIGDIFDQFYFSNTFDLMGKRRKQKRINFLGLEEEGNLKKFQPDLKERFCMNFLHTSLLVVGNVDSNTQDLSGQTNEIFKAVDENNNLLNNRFQGSRTNLNQVVRENINCHYFFEMLGQACLLDICQVETSLNISNRNILELCMFEGENLFIWEEEDILNLTDLESSREQEDL

SEQ ID NO: 151 - protein, 278 aa, Homo sapiens
MAEARSQPSAGPQLNALPDHSPLLQPGLAALRRRAREAGVPLAPLPLTDSFLLRFLRARDFDLDLAWRLLKNYYKWRAECPEISADLHPRSIIGLLKAGYHGVLRSRDPTGSKVLIYRIAHWDPKVFTAYDVFRVSLITSELIVQEVETQRNGIKAIFDLEGWQFSHAFQITPSVAKKIAAVLTDSFPLKVRGIHLINEPVIFHAVFSMIKPFLTEKIKERIHMHGNNYKQSLLQHFPDILPLEYGGEEFSMEDICQEWTNFIMKSEDYLSSISESIQ

SEQ ID NO: 152 - protein, 1221 aa, Homo sapiens
MLFPLQVAAVTSSVRDDPLEHCVSPRTRARSPEICKMADNLDEFIEEQKARLAEDKAELESDPPYMEMKGKLSAKLSENSKILISMAKENIPPNSQQTRGSLGIDYGLSLPLGEDYERKKHKLKEELRQDYRRYLTQERLKLERNKEYNQFLRGKEESSEKFRQVEKSTEPKSQRNKKPIGQVKPDLTSQIQTSCENSEGPRKDVLTPSEAYEELLNQRRLEEDRYRQLDDEIELRNRRIIKKANEEVGISNLKHQRFASKAGIPDRRFHRFNEDRVFDRRYHRPDQDPEVSEEMDERFRYESDFDRRLSRVYTNDRMHRNKRGNMPPMEHDGDVIEQSNIRISSAENKSAPDNETSKSANQDTCSPFAGMLFGGEDRELIQRRKEKYRLELLEQMAEQQRNKRREKDLELRVAASGAQDPEKSPDRLKQFSVAPRHFEEMIPPERPRIAFQTPLPPLSAPSVPPIPSVHPVPSQNEDLRSGLSSALGEMVSPRIAPLPPPPLLPPLATNYRTPYDDAYYFYGSRNTFDPSLAYYGSGMMGVQPAAYVSAPVTHQLAQPVVNTVGQNELKITSDQVINSGLIFEDKPKPSKQSLQSYQEALQQQIREREERRKKEREEKEEYEAKLEAEMRTYNPWGKGGGGAPLRDAKGNLITDLNRMHRQNIDAYHNPDARTYEDKRAVVSLDPNLATSNAENLEDAANKSSGHMQTQSSPFARGNVFGEPPTELQIKQQELYKNFLRFQIEEKKQREEAERERLRIAEEKEERRLAEQRARIQQEYEEEQEKKREKEEEQRLKNEEHIRLAEERQKEAERKKKEEEEKYNLQLQHYCERDNLIGEETKHMRQPSPIVPALQNKIASKLQRPPSVDSIIRSFIHESSMSRAQSPPVPARKNQLRAEEEKKNVIMELSEMRKQLRSEERRLQERLLHMDSDDEIPIRKKERNPMDIFDMARHRLQAPVRRQSPKGLDAATFQNVHDFNELKDRDSETRVDLKFMYLDPPRDHHTLEIQQQALLREQQKRLNRIKMQEGAKVDLDAIPSAKVREQRMPRDDTSDFLKNSLLESDSAFIGAYGETYPAIEDDVLPPPSQLPSARERRRNKWKGLDIDSSRPNVAPDGLSLKSISSVNVDELRVRNEERMRRLNEFHNKPINTDDESSLVDPDDIMKHIGDDGSNSVATEPWLRPGTSETLKRFMAEQLNQEQQQIPGKPGTFTWQGLSTAHG

SEQ ID NO: 153 - protein, 960 aa, Homo sapiens
MWRLRRAAVACEVCQSLVKHSSGIKGSLPLQKLHLVSRSIYHSHHPTLKLQRPQLRTSFQQFSSLTNLPLRKLKFSPIKYGYQPRRNFWPARLATRLLKLRYLILGSAVGGGYTAKKTFDQWKDMIPDLSEYKWIVPDIVWEIDEYIDFEKIRKALPSSEDLVKLAPDFDKIVESLSLLKDFFTSGSPEETAFRATDRGSESDKHFRKVSDKEKIDQLQEELLHTQLKYQRILERLEKENKELRKLVLQKDDKGIHHRKLKKSLIDMYSEVLDVLSDYDASYNTQDHLPRVVVVGDQSAGKTSVLEMIAQARIFPRGSGEMMTRSPVKVTLSEGPHHVALFKDSSREFDLTKEEDLAALRHEIELRMRKNVKEGCTVSPETISLNVKGPGLQRMVLVDLPGVINTVTSGMAPDTKETIFSISKAYMQNPNAIILCIQDGSVDAERSIVTDLVSQMDPHGRRTIFVLTKVDLAEKNVASPSRIQQIIEGKLFPMKALGYFAVVTGKGNSSESIEAIREYEEEFFQNSKLLKTSMLKAHQVTTRNLSLAVSDCFWKMVRESVEQQADSFKATRFNLETEWKNNYPRLRELDRNELFEKAKNEILDEVISLSQVTPKHWEEILQQSLWERVSTHVIENIYLPAAQTMNSGTFNTTVDIKLKQWTDKQLPNKAVEVAWETLQEEFSRFMTEPKGKEHDDIFDKLKEAVKEESIKRHKWNDFAEDSLRVIQHNALEDRSISDKQQWDAAIYFMEEALQARLKDTENAIENMVGPDWKKRWLYWKNRTQEQCVHNETKNELEKMLKCNEEHPAYLASDEITTVRKNLESRGVEVDPSLIKDTWHQVYRRHFLKTALNHCNLCRRGFYYYQRHFVDSELECNDVVLFWRIQRMLAITANTLRQQLTNTEVRRLEKNVKEVLEDFAEDGEKKIKLLTGKRVQLAEDLKKVREIQEKLDAFIEALHQEK

SEQ ID NO: 154 - protein, 305 aa, Homo sapiens
MASRKENAKSANRVLRISQLDALELNKALEQLVWSQFTQCFHGFKPGLLARFEPEVKACLWVFLWRFTIYSKNATVGQSVLNIKYKNDFSPNLRYQPPSKNQKIWYAVCTIGGRWLEERCYDLFRNHHLASFGKVKQCVNFVIGLLKLGGLINFLIFLQRGKFATLTERLLGIHSVFCKPQNICEVGFEYMNRELLWHGFAEFLIFLLPLINVQKLKAKLSSWCIPLTGAPNSDNTLATSGKECALCGEWPTMPHTIGCEHIFCYFCAKSSFLFDVYFTCPKCGTEVHSLQPLKSGIEMSEVNAL

SEQ ID NO: 155 - protein, 809 aa, Homo sapiens
MFKSLTKVNKVKPIGENNENEQSSRRNEEGSHPSNQSQQTTAQEENKGEEKSLKTKSTPVTSEEPHTNIQDKLSKKNSSGDLTTNPDPQNAAEPTGTVPEQKEMDPGKEGPNSPQNKPPAAPVINEYADAQLHNLVKRMRQRTALYKKKLVEGDLSSPEASPQTAKPTAVPPVKESDDKPTEHYYRLLWFKVKKMPLTEYLKRIKLPNSIDSYTDRLYLLWLLLVTLAYNWNCCFIPLRLVFPYQTADNIHYWLIADIICDIIYLYDMLFIQPRLQFVRGGDIIVDSNELRKHYRTSTKFQLDVASIIPFDICYLFFGFNPMFRANRMLKYTSFFEFNHHLESIMDKAYIYRVIRTTGYLLFILHINACVYYWASNYEGIGTTRWVYDGEGNEYLRCYYWAVRTLITIGGLPEPQTLFEIVFQLLNFFSGVFVFSSLIGQMRDVIGAATANQNYFRACMDDTIAYMNNYSIPKLVQKRVRTWYEYTWDSQRMLDESDLLKTLPTTVQLALAIDVNFSIISKVDLFKGCDTQMIYDMLLRLKSVLYLPGDFVCKKGEIGKEMYIIKHGEVQVLGGPDGTKVLVTLKAGSVFGEISLLAAGGGNRRTANVVAHGFANLLTLDKKTLQEILVHYPDSERILMKKARVLLKQKAKTAEATPPRKDLALLFPPKEETPKLFKTLLGGTGKASLARLLKLKREQAAQKKENSEGGEEEGKENEDKQKENEDKQKENEDKGKENEDKDKGREPEEKPLDRPECTASPIAVEEEPHSVRRTVLPRGTSRQSLIISMAPSAEGGEEVLTIEVKEKAKQ

SEQ ID NO: 156 - protein, 207 aa, Homo sapiens
MAEDLDELLDEVESKFCTPDLLRRGMVEQPKGCGGGTHSSDRNQAKAKETLRSTETFKKEDDLDSLINEILEEPNLDKKPSKLKSKSSGNTSVRASIEGLGKSCSPVYLGGSSIPCGIGTNISWRACDHLRCIACDFLVVSYDDYMWDKSCDYLFFRNNMPEFHKLKAKLIKKKGTRAYACQCSWRTIEEVTDLQTDHQLRWVCGKH

SEQ ID NO: 157 - protein, 455 aa, Homo sapiens
MDTPRVLLSAVFLISFLWDLPGFQQASISSSSSSAELGSTKGMRSRKEGKMQRAPRDSDAGREGQEPQPRPQDEPRAQQPRAQEPPGRGPRVVPHEYMLSIYRTYSIAEKLGINASFFQSSKSANTITSFVDRGLDDLSHTPLRRQKYLFDVSMLSDKEELVGAELRLFRQAPSAPWGPPAGPLHVQLFPCLSPLLLDARTLDPQGAPPAGWEVFDVWQGLRHQPWKQLCLELRAAWGELDAGEAEARARGPQQPPPPDLRSLGFGRRVRPPQERALLVVFTRSQRKNLFAEMREQLGSAEAAGPGAGAEGSWPPPSGAPDARPWLPSPGRRRRRTAFASRHGKRHGKKSRLRCSKKPLHVNFKELGWDDWIIAPLEYEAYHCEGVCDFPLRSHLEPTNHAIIQTLMNSMDPGSTPPSCCVPTKLTPISILYIDAGNNVVYKQYEDMVVESCGCR

SEQ ID NO: 158 - protein, 1349 aa, Homo sapiens
MSAPVGPRGRLAPIPAASQPPLQPEMPDLSHLTEEERKIILAVMDRQKKEEEKEQSVLKKLHQQFEMYKEQVKKMGEESQQQQEQKGDAPTCGICHKTKFADGCGHNCSYCQTKFCARCGGRVSLRSNKVMWVCNLCRKQQEILTKSGAWFYNSGSNTPQQPDQKVLRGLRNEEAPQEKKPKLHEQTQFQGPSGDLSVPAVEKSRSHGLTRQHSIKNGSGVKHHIASDIASDRKRSPSVSRDQNRRYDQREEREEYSQYATSDTAMPRSPSDYADRRSQHEPQFYEDSDHLSYRDSNRRSHRHSKEYIVDDEDVESRDEYERQRREEEYQSRYRSDPNLARYPVKPQPYEEQMRIHAEVSRARHERRHSDVSLANADLEDSRISMLRMDRPSRQRSISERRAAMENQRSYSMERTREAQGPSSYAQRTTNHSPPTPRRSPLPIDRPDLRRTDSLRKQHHLDPSSAVRKTKREKMETMLRNDSLSSDQSESVRPPPPKPHKSKKGGKMRQISLSSSEEELASTPEYTSCDDVEIESESVSEKGDMDYNWLDHTSWHSSEASPMSLHPVTWQPSKDGDRLIGRILLNKRLKDGSVPRDSGAMLGLKVVGGKMTESGRLCAFITKVKKGSLADTVGHLRPGDEVLEWNGRLLQGATFEEVYNIILESKPEPQVELVVSRPIGDIPRIPDSTHAQLESSSSSFESQKMDRPSISVTSPMSPGMLRDVPQFLSGQLSSQSLSRRTTPFVPRVQIKLWFDKVGHQLIVTILGAKDLPSREDGRPRNPYVKIYFLPDRSDKNKRRTKTVKKTLEPKWNQTFIYSPVHRREFRERMLEITLWDQARVREEESEFLGEILIELETALLDDEPHWYKLQTHDVSSLPLPHPSPYMPRRQLHGESPTRRLQRSKRISDSEVSDYDCDDGIGVVSDYRHDGRDLQSSTLSVPEQVMSSNHCSPSGSPHRVDVIGRTRSWSPSVPPPQSRNVEQGLRGTRTMTGHYNTISRMDRHRVMDDHYSPDRDRDCEAADRQPYHRSRSTEQRPLLERTTTRSRSTERPDTNLMRSMPSLMTGRSAPPSPALSRSHPRTGSVQTSPSSTPVAGRRGRQLPQLPPKGTLDRKAGGKKLRSTVQRSTETGLAVEMRNWMTRQASRESTDGSMNSYSSEGNLIFPGVRLASDSQFSDFLDGLGPAQLVGRQTLATPAMGDIQVGMMDKKGQLEVEIIRARGLVVKPGSKTLPAPYVKVYLLDNGVCIAKKKTKVARKTLEPLYQQLLSFEESPQGKVLQIIVWGDYGRMDHKSFMGVAQILLDELELSNMVIGWFKLFPPSSLVDPTLAPLTRRASQSSLESSTGPSYSRS

SEQ ID NO: 159 - protein, 545 aa, Homo sapiens
MLKQSERRRSWSYRPWNTTENEGSQHRRSICSLGARSGSQASIHGWTEGNYNYYIEEDEDGEEEDQWKDDLAEEDQQAGEVTTAKPEGPSDPPALLSTLNVNVGGHSYQLDYCELAGFPKTRLGRLATSTSRSRQLSLCDDYEEQTDEYFFDRDPAVFQLVYNFYLSGVLLVLDGLCPRRFLEELGYWGVRLKYTPRCCRICFEERRDELSERLKIQHELRAQAQVEEAEELFRDMRFYGPQRRRLWNLMEKPFSSVAAKAIGVASSTFVLVSVVALALNTVEEMQQHSGQGEGGPDLRPILEHVEMLCMGFFTLEYLLRLASTPDLRRFARSALNLVDLVAILPLYLQLLLECFTGEGHQRGQTVGSVGKVGQVLRVMRLMRIFRILKLARHSTGLRAFGFTLRQCYQQVGCLLLFIAMGIFTFSAAVYSVEHDVPSTNFTTIPHSWWWAAVSISTVGYGDMYPETHLGRFFAFLCIAFGIILNGMPISILYNKFSDYYSKLKAYEYTTIRRERGEVNFMQRARKKIAECLLGSNPQLTPRQEN

SEQ ID NO: 160 - protein, 1045 aa, Homo sapiens
MGSQPPLGSPLSREEGEAPPPAPASEGRRRSRRVRLRGSCRHRPSFLGCRELAASAPARPAPASSEIMASAAKEFKMDNFSPKAGTSKLQQTVPADASPDSKCPICLDRFDNVSYLDRCLHKFCFRCVQEWSKNKAECPLCKQPFDSIFHSVRAEDDFKEYVLRPSYNGSFVTPDRRFRYRTTLTRERNASVYSPSGPVNRRTTTPPDSGVLFEGLGISTRPRDVEIPQFMRQIAVRRPTTADERSLRKIQEQDIINFRRTLYRAGARVRNIEDGGRYRDISAEFFRRNPACLHRLVPWLKRELTVLFGAHGSLVNIVQHIIMSNVTRYDLESQAFVSDLRPFLLNRTEHFIHEFISFARSPFNMAAFDQHANYDCPAPSYEEGSHSDSSVITISPDEAETQELDINVATVSQAPWDDETPGPSYSSSEQVHVTMSSLLNTSDSSDEELVTGGATSQIQGVQTNDDLNNDSDDSSDNCVIVGFVKPLAERTPELVELSSDSEDLGSYEKMETVKTQEQEQSYSSGDSDVSRCSSPHSVLGKDEQINKGHCDSSTRIKSKKEEKRSTSLSSPRNLNSSVRGDRVYSPYNHRHRKRGRSRSSDSRSQSRSGHDQKNHRKHHGKKRMKSKRSRSRESSRPRGRRDKKRSRTRDSSWSRRSQTLSLSSESTSRSRSRSSDHGKRRSRSRNRDRYYLRNNYGSRYKWEYTYYSRNKDRDGYESSYRRRTLSRAHYSRQSSSPEFRVQSFSERTNARKKNNHSERKYYYYERHRSRSLSSNRSRTASTGTDRVRNEKPGGKRKYKTRHLEGTNEVAQPSREFASKAKDSHYQKSSSKLDGNYKNESDTFSDSRSSDRETKHKRRKRKTRSLSVEIVYEGKATDTTKHHKKKKKKHKKKHKKHHGDNASRSPVVITIDSDSDKDSEVKEDTECDNSGPQDPLQNEFLAPSLEPFETKDVVTIEAEFGVLDKECDIATLSNNLNNANKTVDNIPPLAASVEQTLDVREESTFVSDLENQPSNIVSLQTEPSRQLPSPRTSLMSVCLGRDCDMS

SEQ ID NO: 161 - protein, 689 aa, Homo sapiens
MIDSVKLRRDSAADFFSHYEYLCALQNSVPLPAVRACLREGVLDFNADRLRGVDWAPLLSTLKINKDLPLVSIKSFFQPWLGDTGSDMNKFCRSRVPAIRYKDVTFQLCKALKGCLSISSVLKNLELNGLILRERDLTILAKGLNKSASLVHLSLANCPIGDGGLEIICQGIKSSITLKTVNFTGCNLTWQGADHMAKILKYQTMRRHEETWAESLRYRRPDLDCMAGLRRITLNCNTLIGDLGACAFADSLSEDLWLRALDLQQCGLTNEGAKALLEALETNTTLVVLDIRKNPLIDHSMMKAVIKKVLQNGRSAKSEYQWITSPSVKEPSKTAKQKRRTIILGSGHKGKATIRIGLATKKPVSSGRKHSLGKEYYAPAPLPPGVSGFLPWRTAERAKRHRGFPLIKTRDICNQLQQPGFPVTVTVESPSSSEVEEVDDSSESVHEVPEKTSIEQEALQEKLEECLKQLKEERVIRLKVDKRVSELEHENAQLRNINFSLSEALHAQSLTNMILDDEGVLGSIENSFQKFHAFLDLLKDAGLGQLATMAGIDQSDFQLLGHPQMTSTVSNPPKEEKKALEDEKPEPKQNALGQMQNIQFQKITGDARIPLPLDSFPVPVSTPEGLGTSSNNLGVPATEQRQESFEGFIARMCSPSPDATSGTGSQRKEEELSRNSRSSSEKKTKTESH

SEQ ID NO: 162 - protein, 1065 aa, Homo sapiens
MNKSENLLFAGSSLASQVHAAAVNGDKGALQRLIVGNSALKDKEDQFGRTPLMYCVLADRLDCADALLKAGADVNKTDHSQRTALHLAAQKGNYRFMKLLLTRRANWMQKDLEEMTPLHLTTRHRSPKCLALLLKFMAPGEVDTQDKNKQTALHWSAYYNNPEHVKLLIKHDSNIGIPDVEGKIPLHWAANHKDPSAVHTVRCILDAAPTESLLNWQDYEGRTPLHFAVADGNVTVVDVLTSYESCNITSYDNLFRTPLHWAALLGHAQIVHLLLERNKSGTIPSDSQGATPLHYAAQSNFAETVKVFLKHPSVKDDSDLEGRTSFMWAAGKGSDDVLRTMLSLKSDIDINMADKYGGTALHAAALSGHVSTVKLLLENNAQVDATDVMKHTPLFRACEMGHKDVIQTLIKGGARVDLVDQDGHSLLHWAALGGNADVCQILIENKINPNVQDYAGRTPLQCAAYGGYINCMAVLMENNADPNIQDKEGRTALHWSCNNGYLDAIKLLLDFAAFPNQMENNEERYTPLDYALLGERHEVIQFMLEHGALSIAAIQDIAAFKIQAVYKGYKVRKAFRDRKNLLMKHEQLRKDAAAKKREEENKRKEAEQQKGRRSPDSCRPQALPCLPSTQDVPSRQSRAPSKQPPAGNVAQGPEPRDSRGSPGGSLGGALQKEQHVSSDLQGTNSRRPNETAREHSKGQSACVHFRPNEGSDGSRHPGVPSVEKSRGETAGDERCAKGKGFVKQPSCIRVAGPDEKGEDSRRAAASLPPHDSHWKPSRRHDTEPKAKCAPQKRRTQELRGGRCSPAGSSRPGSARGEAVHAGQNPPHHRTPRNKVTQAKLTGGLYSHLPQSTEELRSGARRLETSTLSEDFQVSKETDPAPGPLSGQSVNIDLLPVELRLQIIQRERRRKELFRKKNKAAAVIQRAWRSYQLRKHLSHLRHMKQLGAGDVDRWRQESTALLLQVWRKELELKFPQTTAVSKAPKSPSKGTSGTKSTKHSVLKQIYGCSHEGKIHHPTRSVKASSVLRLNSVSNLQCIHLLENSGRSKNFSYNLQSATQPKNKTKP

SEQ ID NO: 163 - protein, 522 aa, Homo sapiens
MASSRASSTQATKTKAPDDLVAPVVKKPHIYYGSLEEKERERLAKGESGILGKDGLKAGIEAGNINITSGEVFEIEEHISERQAEVLAEFERRKRARQINVSTDDSEVKACLRALGEPITLFGEGPAERRERLRNILSVVGTDALKKTKKDDEKSKKSKEEYQQTWYHEGPNSLKVARLWIANYSLPRAMKRLEEARLHKEIPETTRTSQMQELHKSLRSLNNFCSQIGDDRPISYCHFSPNSKMLATACWSGLCKLWSVPDCNLLHTLRGHNTNVGAIVFHPKSTVSLDPKDVNLASCAADGSVKLWSLDSDEPVADIEGHTVRVARVMWHPSGRFLGTTCYDRSWRLWDLEAQEEILHQEGHSMGVYDIAFHQDGSLAGTGGLDAFGRVWDLRTGRCIMFLEGHLKEIYGINFSPNGYHIATGSGDNTCKVWDLRQRRCVYTIPAHQNLVTGVKFEPIHGNFLLTGAYDNTAKIWTHPGWSPLKTLAGHEGKVMGLDISSDGQLIATCSYDRTFKLWMAE

SEQ ID NO: 164 - protein, 907 aa, Homo sapiens
MNAPLDGLSVSSSSTGSLGSAAGAGGGGGAGLRLLSANVRQLHQALTALLSEAEREQFTHCLNAYHARRNVFDLVRTLRVLLDSPVKRRLLPMLRLVIPRSDQLLFDQYTAEGLYLPATTPYRQPAWGGPDSAGPGEVRLVSLRRAKAHEGLGFSIRGGSEHGVGIYVSLVEPGSLAEKEGLRVGDQILRVNDKSLARVTHAEAVKALKGSKKLVLSVYSAGRIPGGYVTNHIYTWVDPQGRSISPPSGLPQPHGGALRQQEGDRRSTLHLLQGGDEKKVNLVLGDGRSLGLTIRGGAEYGLGIYITGVDPGSEAEGSGLKVGDQILEVNGRSFLNILHDEAVRLLKSSRHLILTVKDVGRLPHARTTVDETKWIASSRIRETMANSAGFLGDLTTEGINKPGFYKGPAGSQVTLSSLGNQTRVLLEEQARHLLNEQEHATMAYYLDEYRGGSVSVEALVMALFKLLNTHAKFSLLSEVRGTISPQDLERFDHLVLRREIESMKARQPPGPGAGDTYSMVSYSDTGSSTGSHGTSTTVSSARNTLDLEETGEAVQGNINALPDVSVDDVRSTSQGLSSFKPLPRPPPLAQGNDLPLGQPRKLGREDLQPPSSMPSCSGTVFSAPQNRSPPAGTAPTPGTSSAQDLPSSPIYASVSPANPSSKRPLDAHLALVNQHPIGPFPRVQSPPHLKSPSAEATVAGGCLLPPSPSGHPDQTGTNQHFVMVEVHRPDSEPDVNEVRALPQTRTASTLSQLSDSGQTLSEDSGVDAGEAEASAPGRGRQSVSTKSRSSKELPRNERPTDGANKPPGLLEPTSTLVRVKKSAATLGIAIEGGANTRQPLPRIVTIQRGGSAHNCGQLKVGHVILEVNGLTLRGKEHREAARIIAEAFKTKDRDYIDFLVTEFNVML

SEQ ID NO: 165 - protein, 653 aa, Homo sapiens
MAAAAASHLNLDALREVLECPICMESFTEEQLRPKLLHCGHTICRQCLEKLLASSINGVRCPFCSKITRITSLTQLTDNLTVLKIIDTAGLSEAVGLLMCRSCGRRLPRQFCRSCGLVLCEPCREADHQPPGHCTLPVKEAAEERRRDFGEKLTRLRELMGELQRRKAALEGVSKDLQARYKAVLQEYGHEERRVQDELARSRKFFTGSLAEVEKSNSQVVEEQSYLLNIAEVQAVSRCDYFLAKIKQADVALLEETADEEEPELTASLPRELTLQDVELLKVGHVGPLQIGQAVKKPRTVNVEDSWAMEATASAASTSVTFREMDMSPEEVVASPRASPAKQRGPEAASNIQQCLFLKKMGAKGSTPGMFNLPVSLYVTSQGEVLVADRGNYRIQVFTRKGFLKEIRRSPSGIDSFVLSFLGADLPNLTPLSVAMNCQGLIGVTDSYDNSLKVYTLDGHCVACHRSQLSKPWGITALPSGQFVVTDVEGGKLWCFTVDRGSGVVKYSCLCSAVRPKFVTCDAEGTVYFTQGLGLNLENRQNEHHLEGGFSIGSVGPDGQLGRQISHFFSENEDFRCIAGMCVDARGDLIVADSSRKEILHFPKGGGYSVLIREGLTCPVGIALTPKGQLLVLDCWDHCIKIYSYHLRRYSTP

SEQ ID NO: 166 - protein, 839 aa, Homo sapiens
MMSASRLAGTLIPAMAFLSCVRPESWEPCVEVVPNITYQCMELNFYKIPDNLPFSTKNLDLSFNPLRHLGSYSFFSFPELQVLDLSRCEIQTIEDGAYQSLSHLSTLILTGNPIQSLALGAFSGLSSLQKLVAVETNLASLENFPIGHLKTLKELNVAHNLIQSFKLPEYFSNLTNLEHLDLSSNKIQSIYCTDLRVLHQMPLLNLSLDLSLNPMNFIQPGAFKEIRLHKLTLRNNFDSLNVMKTCIQGLAGLEVHRLVLGEFRNEGNLEKFDKSALEGLCNLTIEEFRLAYLDYYLDDIIDLFNCLTNVSSFSLVSVTIERVKDFSYNFGWQHLELVNCKFGQFPTLKLKSLKRLTFTSNKGGNAFSEVDLPSLEFLDLSRNGLSFKGCCSQSDFGTTSLKYLDLSFNGVITMSSNFLGLEQLEHLDFQHSNLKQMSEFSVFLSLRNLIYLDISHTHTRVAFNGIFNGLSSLEVLKMAGNSFQENFLPDIFTELRNLTFLDLSQCQLEQLSPTAFNSLSSLQVLNMSHNNFFSLDTFPYKCLNSLQVLDYSLNHIMTSKKQELQHFPSSLAFLNLTQNDFACTCEHQSFLQWIKDQRQLLVEVERMECATPSDKQGMPVLSLNITCQMNKTIIGVSVLSVLVVSVVAVLVYKFYFHLMLLAGCIKYGRGENIYDAFVIYSSQDEDWVRNELVKNLEEGVPPFQLCLHYRDFIPGVAIAANIIHEGFHKSRKVIVVVSQHFIQSRWCIFEYEIAQTWQFLSSRAGIIFIVLQKVEKTLLRQQVELYRLLSRNTYLEWEDSVLGRHIFWRRLRKALLDGKSWNPEGTVGTGCNWQEATSI

SEQ ID NO: 167 - protein, 536 aa, Homo sapiens
MATRAQPGPLSQAGSAGVAALATVGVASGPGPGRPGPLQDETLGVASVPSQWRAVQGIRWETKSCQTASIATASASAQARNHVDAQVQTEAPVPVSVQPPSQYDIPRLAAFLRRVEAMVIRELNKNWQSHAFDGFEVNWTEQQQMVSCLYTLGYPPAQAQGLHVTSISWNSTGSVVACAYGRLDHGDWSTLKSFVCAWNLDRRDLRPQQPSAVVEVPSAVLCLAFHPTQPSHVAGGLYSGEVLVWDLSRLEDPLLWRTGLTDDTHTDPVSQVVWLPEPGHSHRFQVLSVATDGKVLLWQGIGVGQLQLTEGFALVMQQLPRSTKLKKHPRGETEVGATAVAFSSFDPRLFILGTEGGFPLKCSLAAGEAALTRMPSSVPLRAPAQFTFSPHGGPIYSVSCSPFHRNLFLSAGTDGHVHLYSMLQAPPLTSLQLSLKYLFAVRWSPVRPLVFAAASGKGDVQLFDLQKSSQKPTVLIKQTQDESPVYCLEFNSQQTQLLAAGDAQGTVKVWQLSTEFTEQGPREAEDLDCLAAEVAA

SEQ ID NO: 168 - protein, 344 aa, Homo sapiens
MAAAGARPVELGFAESAPAWRLRSEQFPSKVGGRPAWLGAAGLPGPQALACELCGRPLSFLLQVYAPLPGRPDAFHRCIFLFCCREQPCCAGLRVFRNQLPRKNDFYSYEPPSENPPPETGESVCLQLKSGAHLCRVCGCLGPKTCSRCHKAYYCSKEHQTLDWRLGHKQACAQPDHLDHIIPDHNFLFPEFEIVIETEDEIMPEVVEKEDYSEIIGSMGEALEEELDSMAKHESREDKIFQKFKTQIALEPEQILRYGRGIAPIWISGENIPQEKDIPDCPCGAKRILEFQVMPQLLNYLKADRLGKSIDWGILAVFTCAESCSLGTGYTEEFVWKQDVTDTP

SEQ ID NO: 169 - protein, 293 aa, Homo sapiens
MAMEMRLPVARKPLSERLGRDTKKHLVVPGDTITTDTGFMRGHGTYMGEEKLIASVAGSVERVNKLICVKALKTRYIGEVGDIVVGRITEVQQKRWKVETNSRLDSVLLLSSMNLPGGELRRRSAEDELAMRGFLQEGDLISAEVQAVFSDGAVSLHTRSLKYGKLGQGVLVQVSPSLVKRQKTHFHDLPCGASVILGNNGFIWIYPTPEHKEEEAGGFIANLEPVSLADREVISRLRNCIISLVTQRMMLYDTSILYCYEASLPHQIKDILKPEIMEEIVMETRQRLLEQEG

SEQ ID NO: 170 - protein, 644 aa, Homo sapiens
MPSKAENLRPSEPAPQPPEGRTLQGQLPGAPPAQRAGSPPDAPGSESPALACSTPATPSGEDPPARAAPIAPRPPARPRLERALSLDDKGWRRRRFRGSQEDLEARNGTSPSRGSVQSEGPGAPAHSCSPPCLSTSLQEIPKSRGVLSSERGSPSSGGNPLSGVASSSPNLPHRDAAVAGSSPRLPSLLPPRPPPALSLDIASDSLRTANKVDSDLADYKLRAQPLLVRAHSSLGPGRPRSPLACDDCSLRSAKSSFSLLAPIRSKDVRSRSYLEGSLLASGALLGADELARYFPDRNVALFVATWNMQGQKELPPSLDEFLLPAEADYAQDLYVIGVQEGCSDRREWETRLQETLGPHYVLLSSAAHGVLYMSLFIRRDLIWFCSEVECSTVTTRIVSQIKTKGALGISFTFFGTSFLFITSHFTSGDGKVAERLLDYTRTVQALVLPRNVPDTNPYRSSAADVTTRFDEVFWFGDFNFRLSGGRTVVDALLCQGLVVDVPALLQHDQLIREMRKGSIFKGFQEPDIHFLPSYKFDIGKDTYDSTSKQRTPSYTDRVLYRSRHKGDICPVSYSSCPGIKTSDHRPVYGLFRVKVRPGRDNIPLAAGKFDRELYLLGIKRRISKEIQRQQALQSQNSSTICSVS

SEQ ID NO: 171 - protein, 338 aa, Homo sapiens
MEQLRAAARLQIVLGHLGRPSAGAVVAHPTSGTISSASFHPQQFQYTLDNNVLTLEQRKFYEENGFLVIKNLVPDADIQRFRNEFEKICRKEVKPLGLTVMRDVTISKSEYAPSEKMITKVQDFQEDKELFRYCTLPEILKYVECFTGPNIMAMHTMLINKPPDSGKKTSRHPLHQDLHYFPFRPSDLIVCAWTAMEHISRNNGCLVVLPGTHKGSLKPHDYPKWEGGVNKMFHGIQDYEENKARVHLVMEKGDTVFFHPLLIHGSGQNKTQGFRKAISCHFASADCHYIDVKGTSQENIEKEVVGIAHKFFGAENSVNLKDIWMFRARLVKGERTNL

SEQ ID NO: 172 - protein, 534 aa, Homo sapiens
MFQFHAGSWESWCCCCLIPADRPWDRGQHWQLEMADTRSVHETRFEAAVKVIQSLPKNGSFQPTNEMMLKFYSFYKQATEGPCKLSRPGFWDPIGRYKWDAWSSLGDMTKEEAMIAYVEEMKKIIETMPMTEKVEELLRVIGPFYEIVEDKKSGRSSDITSVRLEKISKCLEDLGNVLTSTPNAKTVNGKAESSDSGAESEEEEAQEEVKGAEQSDNDKKMMKKSADHKNLEVIVTNGYDKDGFVQDIQNDIHASSSLNGRSTEEVKPIDENLGQTGKSAVCIHQDINDDHVEDVTGIQHLTSDSDSEVYCDSMEQFGQEESLDSFTSNNGPFQYYLGGHSSQPMENSGFREDIQVPPGNGNIGNMQVVAVEGKGEVKHGGEDGRNNSGAPHREKRGGETDEFSNVRRGRGHRMQHLSEGTKGRQVGSGGDGERWGSDRGSRGSLNEQIALVLMRLQEDMQNVLQRLQKLETLTALQAKSSTSTLQTAPQPTSQRPSWWPFEMSPGVLTFAIIWPFIAQWLVYLYYQRRRRKLN

SEQ ID NO: 173 - protein, 1955 aa, Homo sapiens
MFRQFYLWTCLASGIILGSLFEICLGQYDDDCKLARGGPPATIVAIDEESRNGTILVDNMLIKGTAGGPDPTIELSLKDNVDYWVLMDPVKQMLFLNSTGRVLDRDPPMNIHSIVVQVQCINKKVGTIIYHEVRIVVRDRNDNSPTFKHESYYATVNELTPVGTTIFTGFSGDNGATDIDDGPNGQIEYVIQYNPDDPTSNDTFEIPLMLTGNIVLRKRLNYEDKTRYFVIIQANDRAQNLNERRTTTTTLTVDVLDGDDLGPMFLPCVLVPNTRDCRPLTYQAAIPELRTPEELNPIIVTPPIQAIDQDRNIQPPSDRPGILYSILVGTPEDYPRFFHMHPRTAELSLLEPVNRDFHQKFDLVIKAEQDNGHPLPAFAGLHIEILDENNQSPYFTMPSYQGYILESAPVGATISDSLNLTSPLRIVALDKDIEDTKDPELHLFLNDYTSVFTVTQTGITRYLTLLQPVDREEQQTYTFSITAFDGVQESEPVIVNIQVMDANDNTPTFPEISYDVYVYTDMRPGDSVIQLTAVDADEGSNGEITYEILVGAQGDFIINKTTGLITIAPGVEMIVGRTYALTVQAADNAPPAERRNSICTVYIEVLPPNNQSPPRFPQLMYSLEISEAMRVGAVLLNLQATDREGDSITYAIENGDPQRVFNLSETTGILTLGKALDRESTDRYILIITASDGRPDGTSTATVNIVVTDVNDNAPVFDPYLPRNLSVVEEEANAFVGQVKATDPDAGINGQVHYSLGNFNNLFRITSNGSIYTAVKLNREVRDYYELVVVATDGAVHPRHSTLTLAIKVLDIDDNSPVFTNSTYTVLVEENLPAGTTILQIEAKDVDLGANVSYRIRSPEVKHFFALHPFTGELSLLRSLDYEAFPDQEASITFLVEAFDIYGTMPPGIATVTVIVKDMNDYPPVFSKRIYKGMVAPDAVKGTPITTVYAEDADPPGLPASRVRYRVDDVQFPYPASIFEVEEDSGRVITRVNLNEEPTTIFKLVVVAFDDGEPVMSSSATVKILVLHPGEIPRFTQEEYRPPPVSELATKGTMVGVISAAAINQSIVYSIVSGNEEDTFGINNITGVIYVNGPLDYETRTSYVLRVQADSLEVVLANLRVPSKSNTAKVYIEIQDENNHPPVFQKKFYIGGVSEDARMFTSVLRVKATDKDTGNYSVMAYRLIIPPIKEGKEGFVVETYTGLIKTAMLFHNMRRSYFKFQVIATDDYGKGLSGKADVLVSVVNQLDMQVIVSNVPPTLVEKKIEDLTEILDRYVQEQIPGAKVVVESIGARRHGDAFSLEDYTKCDLTVYAIDPQTNRAIDRNELFKFLDGKLLDINKDFQPYYGEGGRILEIRTPEAVTSIKKRGESLGYTEGALLALAFIIILCCIPAILVVLVSYRQFKVRQAECTKTARIQAALPAAKPAVPAPAPVAAPPPPPPPPPGAHLYEELGDSSILFLLYHFQQSRGNNSVSEDRKHQQVVMPFSSNTIEAHKSAHVDGSLKSNKLKSARKFTFLSDEDDLSAHNPLYKENISQVSTNSDISQRTDFVDPFSPKIQAKSKSLRGPREKIQRLWSQSVSLPRRLMRKVPNRPEIIDLQQWQGTRQKAENENTGICTNKRGSSNPLLTTEEANLTEKEEIRQGETLMIEGTEQLKSLSSDSSFCFPRPHFSFSTLPTVSRTVELKSEPNVISSPAECSLELSPSRPCVLHSSLSRRETPICMLPIETERNIFENFAHPPNISPSACPLPPPPPISPPSPPPAPAPLAPPPDISPFSLFCPPPSPPSIPLPLPPPTFFPLSVSTSGPPTPPLLPPFPTPLPPPPPSIPCPPPPSASFLSTECVCITGVKCTTNLMPAEKIKSSMTQLSTTTVCKTDPQREPKGILRHVKNLAELEKSVANMYSQIEKNYLRTNVSELQTMCPSEVTNMEITSEQNKGSLNNIVEGTEKQSHSQSTSL

SEQ ID NO: 174 - protein, 1247 aa, Homo sapiens
MMREWVLLMSVLLCGLAGPTHLFQPSLVLDMAKVLLDNYCFPENLLGMQEAIQQAIKSHEILSISDPQTLASVLTAGVQSSLNDPRLVISYEPSTPEPPPQVPALTSLSEEELLAWLQRGLRHEVLEGNVGYLRVDSVPGQEVLSMMGEFLVAHVWGNLMGTSALVLDLRHCTGGQVSGIPYIISYLHPGNTILHVDTIYNRPSNTTTEIWTLPQVLGERYGADKDVVVLTSSQTRGVAEDIAHILKQMRRAIVVGERTGGGALDLRKLRIGESDFFFTVPVSRSLGPLGGGSQTWEGSGVLPCVGTPAEQALEKALAILTLRSALPGVVHCLQEVLKDYYTLVDRVPTLLQHLASMDFSTVVSEEDLVTKLNAGLQAASEDPRLLVRAIGPTETPSWPAPDAAAEDSPGVAPELPEDEAIRQALVDSVFQVSVLPGNVGYLRFDSFADASVLGVLAPYVLRQVWEPLQDTEHLIMDLRHNPGGPSSAVPLLLSYFQGPEAGPVHLFTTYDRRTNITQEHFSHMELPGPRYSTQRGVYLLTSHRTATAAEEFAFLMQSLGWATLVGEITAGNLLHTRTVPLLDTPEGSLALTVPVLTFIDNHGEAWLGGGVVPDAIVLAEEALDKAQEVLEFHQSLGALVEGTGHLLEAHYARPEVVGQTSALLRAKLAQGAYRTAVDLESLASQLTADLQEVSGDHRLLVFHSPGELVVEEAPPPPPAVPSPEELTYLIEALFKTEVLPGQLGYLRFDAMAELETVKAVGPQLVRLVWQQLVDTAALVIDLRYNPGSYSTAIPLLCSYFFEAEPRQHLYSVFDRATSKVTEVWTLPQVAGQRYGSHKDLYILMSHTSGSAAEAFAHTMQDLQRATVIGEPTAGGALSVGIYQVGSSPLYASMPTQMAMSATTGKAWDLAGVEPDITVPMSEALSIAQDIVALRAKVPTVLQTAGKLVADNYASAELGAKMATKLSGLQSRYSRVTSEVALAEILGADLQMLSGDPHLKAAHIPENAKDRIPGIVPMQIPSPEVFEELIKFSFHTNVLEDNIGYLRFDMFGDGELLTQVSRLLVEHIWKKIMHTDAMIIDMRFNIGGPTSSIPILCSYFFDEGPPVLLDKIYSRPDDSVSELWTHAQVVGERYGSKKSMVILTSSVTAGTAEEFTYIMKRLGRALVIGEVTSGGCQPPQTYHVDDTNLYLTIPTARSVGASDGSSWEGVGVTPHVVVPAEEALARAKEMLQHNQLRVKRSPGLQDHL

SEQ ID NO: 175 - protein, 1493 aa, Homo sapiens
MPNEGIPHSSQTQEQDCLQSQPVSNNEEMAIKQESGGDGEVEEYLSFRSVGDGLSTSAVGCASAAPRRGPALLHIDRHQIQAVEPSAQALELQGLGVDVYDQDVLEQGVLQQVDNAIHEASRASQLVDVEKEYRSVLDDLTSCTTSLRQINKIIEQLSPQAATSRDINRKLDSVKRQKYNKEQQLKKITAKQKHLQAILGGAEVKIELDHASLEEDAEPGPSSLGSMLMPVQETAWEELIRTGQMTPFGTQIPQKQEKKPRKIMLNEASGFEKYLADQAKLSFERKKQGCNKRAARKAPAPVTPPAPVQNKNKPNKKARVLSKKEERLKKHIKKLQKRALQFQGKVGLPKARRPWESDMRPEAEGDSEGEESEYFPTEEEEEEEDDEVEGAEADLSGDGTDYELKPLPKGGKRQKKVPVQEIDDDFFPSSGEEAEAASVGEGGGGGRKVGRYRDDGDEDYYKQRLRRWNKLRLQDKEKRLKLEDDSEESDAEFDEGFKVPGFLFKKLFKYQQTGVRWLWELHCQQAGGILGDEMGLGKTIQIIAFLAGLSYSKIRTRGSNYRFEGLGPTVIVCPTTVMHQWVKEFHTWWPPFRVAILHETGSYTHKKEKLIRDVAHCHGILITSYSYIRLMQDDISRYDWHYVILDEGHKIRNPNAAVTLACKQFRTPHRIILSGSPMQNNLRELWSLFDFIFPGKLGTLPVFMEQFSVPITMGGYSNASPVQVKTAYKCACVLRDTINPYLLRRMKSDVKMSLSLPDKNEQVLFCRLTDEQHKVYQNFVDSKEVYRILNGEMQIFSGLIALRKICNHPDLFSGGPKNLKGLPDDELEEDQFGYWKRSGKMIVVESLLKIWHKQGQRVLLFSQSRQMLDILEVFLRAQKYTYLKMDGTTTIASRQPLITRYNEDTSIFVFLLTTRVGGLGVNLTGANRVVIYDPDWNPSTDTQARERAWRIGQKKQVTVYRLLTAGTIEEKIYHRQIFKQFLTNRVLKDPKQRRFFKSNDLYELFTLTSPDASQSTETSAIFAGTGSDVQTPKCHLKRRIQPAFGADHDVPKRKKFPASNISVNDATSSEEKSEAKGAEVNAVTSNRSDPLKDDPHMSSNVTSNDRLGEETNAVSGPEELSVISGNGECSNSSGTGKTSMPSGDESIDEKLGLSYKRERPSQAQTEAFWENKQMENNFYKHKSKTKHHSVAEEETLEKHLRPKQKPKNSKHCRDAKFEGTRIPHLVKKRRYQKQDSENKSEAKEQSNDDYVLEKLFKKSVGVHSVMKHDAIMDGASPDYVLVEAEANRVAQDALKALRLSRQRCLGAVSGVPTWTGHRGISGAPAGKKSRFGKKRNSNFSVQHPSSTSPTEKCQDGIMKKEGKDNVPEHFSGRAEDADSSSGPLASSSLLAKMRARNHLILPERLESESGHLQEASALLPTTEHDDLLVEMRNFIAFQAHTDGQASTREILQEFESKLSASQSCVFRELLRNLCTFHRTSGGEGIWKLKPEYC

SEQ ID NO: 176 - protein, 917 aa, Homo sapiens
MIAAQLLAYYFTELKDDQVKKIDKYLYAMRLSDETLIDIMTRFRKEMKNGLSRDFNPTATVKMLPTFVRSIPDGSEKGDFIALDLGGSSFRILRVQVNHEKNQNVHMESEVYDTPENIVHGSGSQLFDHVAECLGDFMEKRKIKDKKLPVGFTFSFPCQQSKIDEAILITWTKRFKASGVEGADVVKLLNKAIKKRGDYDANIVAVVNDTVGTMMTCGYDDQHCEVGLIIGTGTNACYMEELRHIDLVEGDEGRMCINTEWGAFGDDGSLEDIRTEFDREIDRGSLNPGKQLFEKMVSGMYLGELVRLILVKMAKEGLLFEGRITPELLTRGKFNTSDVSAIEKNKEGLHNAKEILTRLGVEPSDDDCVSVQHVCTIVSFRSANLVAATLGAILNRLRDNKGTPRLRTTVGVDGSLYKTHPQYSRRFHKTLRRLVPDSDVRFLLSESGSGKGAAMVTAVAYRLAEQHRQIEETLAHFHLTKDMLLEVKKRMRAEMELGLRKQTHNNAVVKMLPSFVRRTPDGTENGDFLALDLGGTNFRVLLVKIRSGKKRTVEMHNKIYAIPIEIMQGTGEELFDHIVSCISDFLDYMGIKGPRMPLGFTFSFPCQQTSLDAGILITWTKGFKATDCVGHDVVTLLRDAIKRREEFDLDVVAVVNDTVGTMMTCAYEEPTCEVGLIVGTGSNACYMEEMKNVEMVEGDQGQMCINMEWGAFGDNGCLDDIRTHYDRLVDEYSLNAGKQRYEKMISGMYLGEIVRNILIDFTKKGFLFRGQISETLKTRGIFETKFLSQIESDRLALLQVRAILQQLGLNSTCDDSILVKTVCGVVSRRAAQLCGAGMAAVVDKIRENRGLDRLNVTVGVDGTLYKLHPHFSRIMHQTVKELSPKCNVSFLLSEDGSGKGAALITAVGVRLRTEASS

SEQ ID NO: 177 - protein, 3354 aa, Homo sapiens
MGRHVATSCHVAWLLVLISGCWGQVNRLPFFTNHFFDTYLLISEDTPVGSSVTQLLAQDMDNDPLVFGVSGEEASRFFAVEPDTGVVWLRQPLDRETKSEFTVEFSVSDHQGVITRKVNIQVGDVNDNAPTFHNQPYSVRIPENTPVGTPIFIVNATDPDLGAGGSVLYSFQPPSQFFAIDSARGIVTVIRELDYETTQAYQLTVNATDQDKTRPLSTLANLAIIITDVQDMDPIFINLPYSTNIYEHSPPGTTVRIITAIDQDKGRPRGIGYTIVSGNTNSIFALDYISGVLTLNGLLDRENPLYSHGFILTVKGTELNDDRTPSDATVTTTFNILVIDINDNAPEFNSSEYSVAITELAQVGFALPLFIQVVDKDENLGLNSMFEVYLVGNNSHHFIISPTSVQGKADIRIRVAIPLDYETVDRYDFDLFANESVPDHVGYAKVKITLINENDNRPIFSQPLYNISLYENVTVGTSVLTVLATDNDAGTFGEVSYFFSDDPDRFSLDKDTGLIMLIARLDYELIQRFTLTIIARDGGGEETTGRVRINVLDVNDNVPTFQKDAYVGALRENEPSVTQLVRLRATDEDSPPNNQITYSIVSASAFGSYFDISLYEGYGVISVSRPLDYEQISNGLIYLTVMAMDAGNPPLNSTVPVTIEVFDENDNPPTFSKPAYFVSVVENIMAGATVLFLNATDLDRSREYGQESIIYSLEGSTQFRINARSGEITTTSLLDRETKSEYILIVRAVDGGVGHNQKTGIATVNITLLDINDNHPTWKDAPYYINLVEMTPPDSDVTTVVAVDPDLGENGTLVYSIQPPNKFYSLNSTTGKIRTTHAMLDRENPDPHEAELMRKIVVSVTDCGRPPLKATSSATVFVNLLDLNDNDPTFQNLPFVAEVLEGIPAGVSIYQVVAIDLDEGLNGLVSYRMPVGMPRMDFLINSSSGVVVTTTELDRERIAEYQLRVVASDAGTPTKSSTSTLTIHVLDVNDETPTFFPAVYNVSVSEDVPREFRVVWLNCTDNDVGLNAELSYFITGGNVDGKFSVGYRDAVVRTVVGLDRETTAAYMLILEAIDNGPVGKRHTGTATVFVTVLDVNDNRPIFLQSSYEASVPEDIPEGHSILQLKATDADEGEFGRVWYRILHGNHGNNFRIHVSNGLLMRGPRPLDRERNSSHVLIVEAYNHDLGPMRSSVRVIVYVEDINDEAPVFTQQQYSRLGLRETAGIGTSVIVVQATDRDSGDGGLVNYRILSGAEGKFEIDESTGLIITVNYLDYETKTSYMMNVSATDQAPPFNQGFCSVYITLLNELDEAVQFSNASYEAAILENLALGTEIVRVQAYSIDNLNQITYRFNAYTSTQAKALFKIDAITGVITVQGLVDREKGDFYTLTVVADDGGPKVDSTVKVYITVLDENDNSPRFDFTSDSAVSIPEDCPVGQRVATVKAWDPDAGSNGQVVFSLASGNIAGAFEIVTTNDSIGEVFVARPLDREELDHYILQVVASDRGTPPRKKDHILQVTILDINDNPPVIESPFGYNVSVNENVGGGTAVVQVRATDRDIGINSVLSYYITEGNKDMAFRMDRISGEIATRPAPPDRERQSFYHLVATVEDEGTPTLSATTHVYVTIVDENDNAPMFQQPHYEVLLDEGPDTLNTSLITIQALDLDEGPNGTVTYAIVAGNIVNTFRIDRHMGVITAAKELDYEISHGRYTLIVTATDQCPILSHRLTSTTTVLVNVNDINDNVPTFPRDYEGPFEVTEGQPGPRVWTFLAHDRDSGPNGQVEYSIMDGDPLGEFVISPVEGVLRVRKDVELDRETIAFYNLTICARDRGMPPLSSTMLVGIRVLDINDNDPVLLNLPMNITISENSPVSSFVAHVLASDADSGCNARLTFNITAGNRERAFFINATTGIVTVNRPLDRERIPEYKLTISVKDNPENPRIARRDYDLLLIFLSDENDNHPLFTKSTYQAEVMENSPAGTPLTVLNGPILALDADQDIYAVVTYQLLGAQSGLFDINSSTGVVTVRSGVIIDREAFSPPILELLLLAEDIGLLNSTAHLLITILDDNDNRPTFSPATLTVHLLENCPPGFSVLQVTATDEDSGLNGELVYRIEAGAQDRFLIHLVTGVIRVGNATIDREEQESYRLTVVATDRGTVPLSGTAIVTILIDDINDSRPEFLNPIQTVSVLESAEPGTVIANITAIDHDLNPKLEYHIVGIVAKDDTDRLVPNQEDAFAVNINTGSVMVKSPMNRELVATYEVTLSVIDNASDLPERSVSVPNAKLTVNVLDVNDNTPQFKPFGITYYMERILEGATPGTTLIAVAAVDPDKGLNGLVTYTLLDLVPPGYVQLEDSSAGKVIANRTVDYEEVHWLNFTVRASDNGSPPRAAEIPVYLEIVDINDNNPIFDQPSYQEAVFEDVPVGTIILTVTATDADSGNFALIEYSLGDGESKFAINPTTGDIYVLSSLDREKKDHYILTALAKDNPGDVASNRRENSVQVVIQVLDVNDCRPQFSKPQFSTSVYENEPAGTSVITMMATDQDEGPNGELTYSLEGPGVEAFHVDMDSGLVTTQRPLQSYEKFSLTVVATDGGEPPLWGTTMLLVEVIDVNDNRPVFVRPPNGTILHIREEIPLRSNVYEVYATDKDEGLNGAVRYSFLKTAGNRDWEFFIIDPISGLIQTAQRLDRESQAVYSLILVASDLGQPVPYETMQPLQVALEDIDDNEPLFVRPPKGSPQYQLLTVPEHSPRGTLVGNVTGAVDADEGPNAIVYYFIAAGNEEKNFHLQPDGCLLVLRDLDREREAIFSFIVKASSNRSWTPPRGPSPTLDLVADLTLQEVRVVLEDINDQPPRFTKAEYTAGVATDAKVGSELIQVLALDADIGNNSLVFYSILAIHYFRALANDSEDVGQVFTMGSMDGILRTFDLFMAYSPGYFVVDIVARDLAGHNDTAIIGIYILRDDQRVKIVINEIPDRVRGFEEEFIHLLSNITGAIVNTDNVQFHVDKKGRVNFAQTELLIHVVNRDTNRILDVDRVIQMIDENKEQLRNLFRNYNVLDVQPAISVRLPDDMSALQMAIIVLAILLFLAAMLFVLMNWYYRTVHKRKLKAIVAGSAGNRGFIDIMDMPNTNKYSFDGANPVWLDPFCRNLELAAQAEHEDDLPENLSEIADLWNSPTRTHGTFGREPAAVKPDDDRYLRAAIQEYDNIAKLGQIIREGPIKGSLLKVVLEDYLRLKKLFAQRMVQKASSCHSSISELIQTELDEEPGDHSPGQGSLRFRHKPPVELKGPDGIHVVHGSTGTLLATDLNSLPEEDQKGLGRSLETLTAAEATAFERNARTESAKSTPLHKLRDVIMETPLEITEL

SEQ ID NO: 178 - protein, 859 aa, Homo sapiens
MRRCRWAALALGLLRLCLAQANFAPHFFDNGVGSTNGNMALFSLPEDTPVGSHVYTLNGTDPEGDPISYHISFDPSTRSVFSVDPTFGNITLVEELDREREDEIEAIISISDGLNLVAEKVVILVTDANDEAPRFIQEPYVALVPEDIPAGSIIFKVHAVDRDTGSGGSVTYFLQNLHSPFAVDRHSGVLRLQAGATLDYERSRTHYITVVAKDGGGRLHGADVVFSATTTVTVNVEDVQDMAPVFVGTPYYGYVYEDTLPGSEVLKVVAMDGDRGKPNRILYSLVNGNDGAFEINETSGAISITQSPAQLQREVYELHVQVTEMSPAGSPAAQATVPVTIRIVDLNNHPPTFYGESGPQNRFELSMNEHPPQGEILRGLKITVNDSDQGANAKFNLQLVGPRGIFRVVPQTVLNEAQVTIIVENSAAIDFEKSKVLTFKLLAVEVNTPEKFSSTADVVIQLLDTNDNVPKFDSLYYVARIPENAPGGSSVVAVTAVDPDTGPWGEVKYSTYGTGADLFLIHPSTGLIYTQPWASLDAEATARYNFYVKAEDMEGKYSVAEVFITLLDVNDHPPQFGKSVQKKTMVLGTPVKIEAIDEDAEEPNNLVDYSITHAEPANVFDINSHTGEIWLKNSIRSLDALHNITPGRDCLWSLEVQAKDRGSPSFSTTALLKIDITDAETLSRSPMAAFLIQTKDNPMKAVGVLAGTMATVVAITVLISTATFWRNKKSNKVLPMRRVLRKRPSPAPRTIRIEWLKSKSTKAATKFMLKEKPPNENCNNNSPESSLLPRAPALPPPPSVAPSTGAAQWTVPTVSGSLTPQPTQPPPKPKTMGSPVQSTLISELKQKFEKKSVHNKAYF

SEQ ID NO: 179 - protein, 291 aa, Homo sapiens
MAETSALPTGFGELEVLAVGMVLLVEALSGLSLNTLTIFSFCKTPELRTPCHLLVLSLALADSGISLNALVAATSSLLRRWPYGSDGCQAHGFQGFVTALASICSSAAIAWGRYHHYCTRSQLAWNSAVSLVLFVWLSSAFWAALPLLGWGHYDYEPLGTCCTLDYSKGDRNFTSFLFTMSFFNFAMPLFITITSYSLMEQKLGKSGHLQVNTTLPARTLLLGWGPYAILYLYAVIADVTSISPKLQMVPALIAKMVPTINAINYALGNEMVCRGIWQCLSPQKREKDRTK

SEQ ID NO: 180 - protein, 1056 aa, Homo sapiens
MASQPNSSAKKKEEKGKNIQVVVRCRPFNLAERKASAHSIVECDPVRKEVSVRTGGLADKSSRKTYTFDMVFGASTKQIDVYRSVVCPILDEVIMGYNCTIFAYGQTGTGKTFTMEGERSPNEEYTWEEDPLAGIIPRTLHQIFEKLTDNGTEFSVKVSLLEIYNEELFDLLNPSSDVSERLQMFDDPRNKRGVIIKGLEEITVHNKDEVYQILEKGAAKRTTAATLMNAYSSRSHSVFSVTIHMKETTIDGEELVKIGKLNLVDLAGSENIGRSGAVDKRAREAGNINQSLLTLGRVITALVERTPHVPYRESKLTRILQDSLGGRTRTSIIATISPASLNLEETLSTLEYAHRAKNILNKPEVNQKLTKKALIKEYTEEIERLKRDLAAAREKNGVYISEENFRVMSGKLTVQEEQIVELIEKIGAVEEELNRVTELFMDNKNELDQCKSDLQNKTQELETTQKHLQETKLQLVKEEYITSALESTEEKLHDAASKLLNTVEETTKDVSGLHSKLDRKKAVDQHNAEAQDIFGKNLNSLFNNMEELIKDGSSKQKAMLEVHKTLFGNLLSSSVSALDTITTVALGSLTSIPENVSTHVSQIFNMILKEQSLAAESKTVLQELINVLKTDLLSSLEMILSPTVVSILKINSQLKHIFKTSLTVADKIEDQKKELDGFLSILCNNLHELQENTICSLVESQKQCGNLTEDLKTIKQTHSQELCKLMNLWTERFCALEEKCENIQKPLSSVQENIQQKSKDIVNKMTFHSQKFCADSDGFSQELRNFNQEGTKLVEESVKHSDKLNGNLEKISQETEQRCESLNTRTVYFSEQWVSSLNEREQELHNLLEVVSQCCEASSSDITEKSDGRKAAHEKQHNIFLDQMTIDEDKLIAQNLELNETIKIGLTKLNCFLEQDLKLDIPTGTTPQRKSYLYPSTLVRTEPREHLLDQLKRKQPELLMMLNCSENNKEETIPDVDVEEAVLGQYTEEPLSQEPSVDAGVDCSSIGGVPFFQHKKSHGKDKENRGINTLERSKVEETTEHLVTKSRLPLRAQINL

SEQ ID NO: 181 - protein, 201 aa, Homo sapiens
MKWVWALLLLAALGSGRAERDCRVSSFRVKENFDKARFSGTWYAMAKKDPEGLFLQDNIVAEFSVDETGQMSATAKGRVRLLNNWDVCADMVGTFTDTEDPAKFKMKYWGVASFLQKGNDDHWIVDTDYDTYAVQYSCRLLNLDGTCADSYSFVFSRDPNGLPPEAQKIVRQRQEELCLARQYRLIVHNGYCDGRSERNLL

SEQ ID NO: 182 - protein, 858 aa, Homo sapiens
MGEINQVAVEKYLEENPQFAKEYFDRKLRVEVLGEIFKNSQVPVQSSMSFSELTQVEESALCLELLWTVQEEGGTPEQGVHRALQRLAHLLQADRCSMFLCRSRNGIPEVASRLLDVTPTSKFEDNLVGPDKEVVFPLDIGIVGWAAHTKKTHNVPDVKKNSHFSDFMDKQTGYVTKNLLATPIVVGKEVLAVIMAVNKVNASEFSKQDEEVFSKYLNFVSIILRLHHTSYMYNIESRRSQILMWSANKVFEELTDVERQFHKALYTVRSYLNCERYSIGLLDMTKEKEFYDEWPIKLGEVEPYKGPKTPDGREVNFYKIIDYILHGKEEIKVIPTPPADHWTLISGLPTYVAENGFICNMMNAPADEYFTFQKGPVDETGWVIKNVLSLPIVNKKEDIVGVATFYNRKDGKPFDEHDEYITETLTQFLGWSLLNTDTYDKMNKLENRKDIAQEMLMNQTKATPEEIKSILKFQEKLNVDVIDDCEEKQLVAILKEDLPDPRSAELYEFRFSDFPLTEHGLIKCGIRLFFEINVVEKFKVPVEVLTRWMYTVRKGYRAVTYHNWRHGFNVGQTMFTLLMTGRLKKYYTDLEAFAMLAAAFCHDIDHRGTNNLYQMKSTSPLARLHGSSILERHHLEYSKTLLQDESLNIFQNLNKRQFETVIHLFEVAIIATDLALYFKKRTMFQKIVDACEQMQTEEEAIKYVTVDPTKKEIIMAMMMTACDLSAITKPWEVQSQVALMVANEFWEQGDLERTVLQQQPIPMMDRNKRDELPKLQVGFIDFVCTFVYKEFSRFHKEITPMLSGLQNNRVEWKSLADEYDAKMKVIEEEAKKQEGGAEKAAEDSGGGDDKKSKTCLML

SEQ ID NO: 183 - protein, 417 aa, Homo sapiens
MDMHCKADPFSAMHPGHGGVNQLGGVFVNGRPLPDVVRQRIVELAHQGVRPCDISRQLRVSHGCVSKILGRYYETGSIKPGVIGGSKPKVATPKVVDKIAEYKRQNPTMFAWEIRDRLLAEGICDNDTVPSVSSINRIIRTKVQQPFHPTPDGAGTGVTAPGHTIVPSTASPPVSSASNDPVGSYSINGILGIPRSNGEKRKRDEVEVYTDPAHIRGGGGLHLVWTLRDVSEGSVPNGDSQSGVDSLRKHLRADTFTQQQLEALDRVFERPSYPDVFQASEHIKSEQGNEYSLPALTPGLDEVKSSLSASTNPELGSNVSGTQTYPVVTGRDMASTTLPGYPPHVPPTGQGSYPTSTLAGMVPGSEFSGNPYSHPQYTAYNEAWRFSNPALLSSPYYYSAAPRGSAPAAAAAAYDRH

SEQ ID NO: 184 - protein, 1033 aa, Homo sapiens
MAQGFAVGFDPLGLGDLSSGSLSSLSSRGHLGSDSGSTATRYLLRKQQRLLNGPPRGIRASSPMGRVILINSPIEANSDESDIIHSVRVEKSPAGRLGFSVRGGSEHGLGIFVSKVEEGSSAERAGLCVGDKITEVNGLSLESTTMGSAVKVLTSSSRLHMMVRRMGRVPGIKFSKEKTTWVDVVNRRLVVEKCGSTPSDTSSEDGVRRIVHLYTTSDDFCLGFNIRGGKEFGLGIYVSKVDHGGLAEENGIKVGDQVLAANGVRFDDISHSQAVEVLKGQTHIMLTIKETGRYPAYKEMVSEYCWLDRLSNGVLQQLSPASESSSSVSSCASSAPYSSGSLPSDRMDICLGQEEPGSRGPGWGRADTAMQTEPDAGGRVETWCSVRPTVILRDTAIRSDGPHPGRRLDSALSESPKTALLLALSRPRPPITRSQSYLTLWEEKQQRKKEKSGSPGEKGALQRSKTLMNLFFKGGRQGRLARDGRREAWTLDSGSLAKTYPRLDIEKAGGVGPVQKFVTWRLRRDQERGRALLSARSGSPSSQLPNVDEQVQAWESRRPLIQDLAQRLLTDDEVLAVTRHCSRYVHEGGIEDLVRPLLAILDRPEKLLLLQDIRSVVAPTDLGRFDSMVMLVELEAFEALKSRAVRPPALRPARQDTPPKRHLITPVPDSRGGFYLLPVNGFPEEEDNGELRERLGALKVSPSASAPRHPHKGIPPLQDVPVDAFTPLRIACTPPPQLPPVAPRPLRPNWLLTEPLSREHPPQSQIRGRAQSRSRSRSRSRSRSSRGQGKSPGRRSPSPVPTPAPSMTNGRYHKPRKARPPLPRPLDGEAAKVGAKQGPSESGTEGTAKEAAMKNPSGELKTVTLSKMKQSLGISISGGIESKVQPMVKIEKIFPGGAAFLSGALQAGFELVAVDGENLEQVTHQRAVDTIRRAYRNKAREPMELVVRVPGPSPRPSPSDSSALTDGGLPADHLPAHQPLDAAPVPAHWLPEPPTNPQTPPTDARLLQPTPSPAPSPALQTPDSKPAPSPRIP

SEQ ID NO: 185 - protein, 182 aa, Homo sapiens
MGLLSILRKLKSAPDQEVRILLLGLDNAGKTTLLKQLASEDISHITPTQGFNIKSVQSQGFKLNVWDIGGQRKIRPYWKNYFENTDILIYVIDSADRKRFEETGQELAELLEEEKLSCVPVLIFANKQDLLTAAPASEIAEGLNLHTIRDRVWQIQSCSALTGEGVQDGMNWVCKNVNAKKK

SEQ ID NO: 186 - protein, 92 aa, Homo sapiens
MLKAAAKRPELSGKNTISNNSDMAEVKSMFREVLPKQGPLFVEDIMTMVLCKPKLLPLKSLTLEKLEKMHQAAQNTIRQQEMAEKDQRQITH

SEQ ID NO: 187 - protein, 107 aa, Homo sapiens
MLRLYPGPMVTEAEGKGGPEMASLSSSVVPVSFISTLRESVLDPGVGGEGASDKQRSKLSLSHSMIPAAKIHTELCLPAFFSPAGTQRRFQQPQHHLTLSIIHTAAR

SEQ ID NO: 188 - protein, 480 aa, Homo sapiens
MQIPRAALLPLLLLLLAAPASAQLSRAGRSAPLAAGCPDRCEPARCPPQPEHCEGGRARDACGCCEVCGAPEGAACGLQEGPCGEGLQCVVPFGVPASATVRRRAQAGLCVCASSEPVCGSDANTYANLCQLRAASRRSERLHRPPVIVLQRGACGQGQEDPNSLRHKYNFIADVVEKIAPAVVHIELFRKLPFSKREVPVASGSGFIVSEDGLIVTNAHVVTNKHRVKVELKNGATYEAKIKDVDEKADIALIKIDHQGKLPVLLLGRSSELRPGEFVVAIGSPFSLQNTVTTGIVSTTQRGGKELGLRNSDMDYIQTDAIINYGNSGGPLVNLDGEVIGINTLKVTAGISFAIPSDKIKKFLTESHDRQAKGKAITKKKYIGIRMMSLTSSKAKELKDRHRDFPDVISGAYIIEVIPDTPAEAGGLKENDVIISINGQSVVSANDVSDVIKRESTLNMVVRRGNEDIMITVIPEEIDP

SEQ ID NO: 189 - protein, 439 aa, Homo sapiens
MFSKLAHLQRFAVLSRGVHSSVASATSVATKKTVQGPPTSDDIFEREYKYGAHNYHPLPVALERGKGIYLWDVEGRKYFDFLSSYSAVNQGHCHPKIVNALKSQVDKLTLTSRAFYNNVLGEYEEYITKLFNYHKVLPMNTGVEAGETACKLARKWGYTVKGIQKYKAKIVFAAGNFWGRTLSAISSSTDPTSYDGFGPFMPGFDIIPYNDLPALERALQDPNVAAFMVEPIQGEAGVVVPDPGYLMGVRELCTRHQVLFIADEIQTGLARTGRWLAVDYENVRPDIVLLGKALSGGLYPVSAVLCDDDIMLTIKPGEHGSTYGGNPLGCRVAIAALEVLEEENLAENADKLGIILRNELMKLPSDVVTAVRGKGLLNAIVIKETKDWDAWKVCLRLRDNGLLAKPTHGDIIRFAPPLVIKEDELRESIEIINKTILSF

SEQ ID NO: 190 - protein, 720 aa, Homo sapiens
MEEAEELLLEGKKALQLAREPRLGLDLGWNPSGEGCTQGLKDVPPEPTRDILALKSLPRGLALGPSLAKEQRLGVWCVGDPLQPGLLWGPLEEESASKEKGEGVKPRQEENLSLGPWGDVCACEQSSGWTSLVQRGRLESEGNVAPVRISERLHLQVYQLVLPGSELLLWPQPSSEGPSLTQPGLDKEAAVAVVTEVESAVQQEVASPGEDAAEPCIDPGSQSPSGIQAENMVSPGLKFPTQDRISKDSQPLGPLLQDGDVDEECPAQAQMPPELQSNSATQQDPDGSGASFSSSARGTQPHGYLAKKLHSPSDQCPPRAKTPEPGAQQSGFPTLSRSPPGPAGSSPKQGRRYRCGECGKAFLQLCHLKKHAFVHTGHKPFLCTECGKSYSSEESFKAHMLGHRGVRPFPCPQCDKAYGTQRDLKEHQVVHSGARPFACDQCGKAFARRPSLRLHRKTHQVPAAPAPCPCPVCGRPLANQGSLRNHMRLHTGEKPFLCPHCGRAFRQRGNLRGHLRLHTGERPYRCPHCADAFPQLPELRRHLISHTGEAHLCPVCGKALRDPHTLRAHERLHSGERPFPCPQCGRAYTLATKLRRHLKSHLEDKPYRCPTCGMGYTLPQSLRRHQLSHRPEAPCSPPSVPSAASEPTVVLLQAEPQLLDTHREEEVSPARDVVEVTISESQEKCFVVPEEPDAAPSLVLIHKDMGLGAWAEVVEVEMGT

SEQ ID NO: 191 - protein, 506 aa, Homo sapiens
MTSKPHSDWIPYSVLDDEGRNLRQQKLDRQRALLEQKQKKKRQEPLMVQANADGRPRSRRARQSEEQAPLVESYLSSSGSTSYQVQEADSLASVQLGATRPTAPASAKRTKAAATAGGQGGAARKEKKGKHKGTSGPAALAEDKSEAQGPVQILTVGQSDHAQDAGETAAGGGERPSGQDLRATMQRKGISSSMSFDEDEEDEEENSSSSSQLNSNTRPSSATSRKSVREAASAPSPTAPEQPVDVEVQDLEEFALRPAPQGITIKCRITRDKKGMDRGMYPTYFLHLDREDGKKVFLLAGRKRKKSKTSNYLISVDPTDLSRGGDSYIGKLRSNLMGTKFTVYDNGVNPQKASSSTLESGTLRQELAAVCYETNVLGFKGPRKMSVIVPGMNMVHERVSIRPRNEHETLLARWQNKNTESIIELQNKTPVWNDDTQSYVLNFHGRVTQASVKNFQIIHGNDPDYIVMQFGRVAEDVFTMDYNYPLCALQAFAIALSSFDSKLACE

SEQ ID NO: 192 - protein, 426 aa, Homo sapiens
MEPSSWSGSESPAENMERMSDSADKPIDNDAEGVWSPDIEQSFQEALAIYPPCGRRKIILSDEGKMYGRNELIARYIKLRTGKTRTRKQVSSHIQVLARRKSRDFHSKLKDQTAKDKALQHMAAMSSAQIVSATAIHNKLGLPGIPRPTFPGAPGFWPGMIQTGQPGSSQDVKPFVQQAYPIQPAVTAPIPGFEPASAPAPSVPAWQGRSIGTTKLRLVEFSAFLEQQRDPDSYNKHLFVHIGHANHSYSDPLLESVDIRQIYDKFPEKKGGLKELFGKGPQNAFFLVKFWADLNCNIQDDAGAFYGVTSQYESSENMTVTCSTKVCSFGKQVVEKVETEYARFENGRFVYRINRSPMCEYMINFIHKLKHLPEKYMMNSVLENFTILLVVTNRDTQETLLCMACVFEVSNSEHGAQHHIYRLVKD

SEQ ID NO: 193 - protein, 552 aa, Homo sapiens
MDRKVAREFRHKVDFLIENDAEKDYLYDVLRMYHQTMDVAVLVGDLKLVINEPSRLPLFDAIRPLIPLKHQVEYDQLTPRRSRKLKEVRLDRLHPEGLGLSVRGGLEFGCGLFISHLIKGGQADSVGLQVGDEIVRINGYSISSCTHEEVINLIRTKKTVSIKVRHIGLIPVKSSPDEPLTWQYVDQFVSESGGVRGSLGSPGNRENKEKKVFISLVGSRGLGCSISSGPIQKPGIFISHVKPGSLSAEVGLEIGDQIVEVNGVDFSNLDHKEAVNVLKSSRSLTISIVAAAGRELFMTDRERLAEARQRELQRQELLMQKRLAMESNKILQEQQEMERQRRKEIAQKAAEENERYRKEMEQIVEEEEKFKKQWEEDWGSKEQLLLPKTITAEVHPVPLRKPKYDQGVEPELEPADDLDGGTEEQGEQDFRKYEEGFDPYSMFTPEQIMGKDVRLLRIKKEGSLDLALEGGVDSPIGKVVVSAVYERGAAERHGGIVKGDEIMAINGKIVTDYTLAEAEAALQKAWNQGGDWIDLVVAVCPPKEYDDELTFF

SEQ ID NO: 194 - protein, 145 aa, Homo sapiens
MLPRGLKMAPRGKRLSSTPLEILFFLNGWYNATYFLLELFIFLYKGVLLPYPTANLVLDVVMLLLYLGIEVIRLFFGTKGNLCQRKMPLSISVALTFPSAMMASYYLLLQTYVLRLEAIMNGILLFFCGSELLLEVLTLAAFSRI

SEQ ID NO: 195 - protein, 585 aa, Homo sapiens
MTITYTSQVANARLGSFSRLLLCWRGSIYKLLYGEFLIFLLCYYIIRFIYRLALTEEQQLMFEKLTLYCDSYIQLIPISFVLGFYVTLVVTRWWNQYENLPWPDRLMSLVSGFVEGKDEQGRLLRRTLIRYANLGNVLILRSVSTAVYKRFPSAQHLVQAGFMTPAEHKQLEKLSLPHNMFWVPWVWFANLSMKAWLGGRIRDPILLQSLLNEMNTLRTQCGHLYAYDWISIPLVYTQVVTVAVYSFFLTCLVGRQFLNPAKAYPGHELDLVVPVFTFLQFFFYVGWLKVAEQLINPFGEDDDDFETNWIVDRNLQVSLLAVDEMHQDLPRMEPDMYWNKPEPQPPYTAASAQFRRASFMGSTFNISLNKEEMEFQPNQEDEEDAHAGIIGRFLGLQSHDHHPPRANSRTKLLWPKRESLLHEGLPKNHKAAKQNVRGQEDNKAWKLKAVDAFKSAPLYQRPGYYSAPQTPLSPTPMFFPLEPSAPSKLHSVTGIDTKDKSLKTVSSGAKKSFELLSESDGALMEHPEVSQVRRKTVEFNLTDMPEIPENHLKEPLEQSPTNIHTTLKDHMDPYWALENRDEAHS

SEQ ID NO: 196 - protein, 308 aa, Homo sapiens
MNPIVVVHGGGAGPISKDRKERVHQGMVRAATVGYGILREGGSAVDAVEGAVVALEDDPEFNAGCGSVLNTNGEVEMDASIMDGKDLSAGAVSAVQCIANPIKLARLVMEKTPHCFLTDQGAAQFAAAMGVPEIPGEKLVTERNKKRLEKEKHEKGAQKTDCQKNLGTVGAVALDCKGNVAYATSTGGIVNKMVGRVGDSPCLGAGGYADNDIGAVSTTGHGESILKVNLARLTLFHIEQGKTVEEAADLSLGYMKSRVKGLGGLIVVSKTGDWVAKWTSTSMPWAAAKDGKLHFGIDPDDTTITDLP

SEQ ID NO: 197 - protein, 351 aa, Homo sapiens
MAPVLPLVLPLQPRIRLAQGLWLLSWLLALAGGVILLCSGHLLVQLRHLGTFLAPSCQFPVLPQAALAAGAVALGTGLVGVGASRASLNAALYPPWRGVLGPLLVAGTAGGGGLLVVGLGLALALPGSLDEALEEGLVTALAHYKDTEVPGHCQAKRLVDELQLRYHCCGRHGYKDWFGVQWVSSRYLDPGDRDVADRIQSNVEGLYLTDGVPFSCCNPHSPRPCLQNRLSDSYAHPLFDPRQPNQNLWAQGCHEVLLEHLQDLAGTLGSMLAVTFLLQALVLLGLRYLQTALEGLGGVIDAGGETQGYLFPSGLKDMLKTAWLQGGVACRPAPEEAPPGEAPPKEDLSEA

SEQ ID NO: 198 - protein, 593 aa, Homo sapiens
MAAASSSDSDACGAESNEANSKWLDAHYDPMANIHTFSACLALADLHGDGEYKLVVGDLGPGGQQPRLKVLKGPLVMTESPLPALPAAAATFLMEQHEPRTPALALASGPCVYVYKNLRPYFKFSLPQLPPNPLEQDLWNQAKEDRIDPLTLKEMLESIRETAEEPLSIQSLRFLQLELSEMEAFVNQHKSNSIKRQTVITTMTTLKKNLADEDAVSCLVLGTENKELLVLDPEAFTILAKMSLPSVPVFLEVSGQFDVEFRLAAACRNGNIYILRRDSKHPKYCIELSAQPVGLIRVHKVLVVGSTQDSLHGFTHKGKKLWTVQMPAAILTMNLLEQHSRGLQAVMAGLANGEVRIYRDKALLNVIHTPDAVTSLCFGRYGREDNTLIMTTRGGGLIIKILKRTAVFVEGGSEVGPPPAQAMKLNVPRKTRLYVDQTLREREAGTAMHRAFQTDLYLLRLRAARAYLQALESSLSPLSTTAREPLKLHAVVQGLGPTFKLTLHLQNTSTTRPVLGLLVCFLYNEALYSLPRAFFKVPLLVPGLNYPLETFVESLSNKGISDIIKVLVLREGQSAPLLSAHVNMPGSEGLAAA

SEQ ID NO: 199 - protein, 275 aa, Homo sapiens
MTTEQARGQQGPNLAIGRQKPPAGVVTPKSDAEEPPLTRKRSKKERGLRGSRKRTGSSGEQTGPEAPGSSNNPPSTGEGPAGAPPASPGPASSRQSHRHRPDSLHDAAQRTYGPLLNRVFGKDRELGPEELDELQAAFEEFDTDRDGYISHRELGDCMRTLGYMPTEMELLEVSQHIKMRMGGRVDFEEFVELIGPKLREETAHMLGVRELRIAFREFDRDRDGRITVAELREAVPALLGEPLAGPELDEMLREVDLNGDGTVDFDEFVMMLSRH

SEQ ID NO: 200 - protein, 1615 aa, Homo sapiens
MEAAPPGPPWPLLLLLLLLLALCGCPAPAAASPLLLFANRRDVRLVDAGGVKLESTIVVSGLEDAAAVDFQFSKGAVYWTDVSEEAIKQTYLNQTGAAVQNVVISGLVSPDGLACDWVGKKLYWTDSETNRIEVANLNGTSRKVLFWQDLDQPRAIALDPAHGYMYWTDWGETPRIERAGMDGSTRKIIVDSDIYWPNGLTIDLEEQKLYWADAKLSFIHRANLDGSFRQKVVEGSLTHPFALTLSGDTLYWTDWQTRSIHACNKRTGGKRKEILSALYSPMDIQVLSQERQPFFHTRCEEDNGGCSHLCLLSPSEPFYTCACPTGVQLQDNGRTCKAGAEEVLLLARRTDLRRISLDTPDFTDIVLQVDDIRHAIAIDYDPLEGYVYWTDDEVRAIRRAYLDGSGAQTLVNTEINDPDGIAVDWVARNLYWTDTGTDRIEVTRLNGTSRKILVSEDLDEPRAIALHPVMGLMYWTDWGENPKIECANLDGQERRVLVNASLGWPNGLALDLQEGKLYWGDAKTDKIEVINVDGTKRRTLLEDKLPHIFGFTLLGDFIYWTDWQRRSIERVHKVKASRDVIIDQLPDLMGLKAVNVAKVVGTNPCADRNGGCSHLCFFTPHATRCGCPIGLELLSDMKTCIVPEAFLVFTSRAAIHRISLETNNNDVAIPLTGVKEASALDFDVSNNHIYWTDVSLKTISRAFMNGSSVEHVVEFGLDYPEGMAVDWMGKNLYWADTGTNRIEVARLDGQFRQVLVWRDLDNPRSLALDPTKGYIYWTEWGGKPRIVRAFMDGTNCMTLVDKVGRANDLTIDYADQRLYWTDLDTNMIESSNMLGQERVVIADDLPHPFGLTQYSDYIYWTDWNLHSIERADKTSGRNRTLIQGHLDFVMDILVFHSSRQDGLNDCMHNNGQCGQLCLAIPGGHRCGCASHYTLDPSSRNCSPPTTFLLFSQKSAISRMIPDDQHSPDLILPLHGLRNVKAIDYDPLDKFIYWVDGRQNIKRAKDDGTQPFVLTSLSQGQNPDRQPHDLSIDIYSRTLFWTCEATNTINVHRLSGEAMGVVLRGDRDKPRAIVVNAERGYLYFTNMQDRAAKIERAALDGTEREVLFTTGLIRPVALVVDNTLGKLFWVDADLKRIESCDLSGANRLTLEDANIVQPLGLTILGKHLYWIDRQQQMIERVEKTTGDKRTRIQGRVAHLTGIHAVEEVSLEEFSAHPCARDNGGCSHICIAKGDGTPRCSCPVHLVLLQNLLTCGEPPTCSPDQFACATGEIDCIPGAWRCDGFPECDDQSDEEGCPVCSAAQFPCARGQCVDLRLRCDGEADCQDRSDEADCDAICLPNQFRCASGQCVLIKQQCDSFPDCIDGSDELMCEITKPPSDDSPAHSSAIGPVIGIILSLFVMGGVYFVCQRVVCQRYAGANGPFPHEYVSGTPHVPLNFIAPGGSQHGPFTGIACGKSMMSSVSLMGGRGGVPLYDRNHVTGASSSSSSSTKATLYPPILNPPPSPATDPSLYNMDMFYSSNIPATARPYRPYIIRGMAPPTTPCSTDVCDSDYSASRWKASKYYLDLNSDSDPYPPPPTPHSQYLSAEDSCPPSPATERSYFHLFPPPPSPCTDSS

SEQ ID NO: 201 - protein, 640 aa, Homo sapiens
MFSCVKPYEDQNYSALRRDCRRRKVLFEDPLFPATDDSLYYKGTPGPAVRWKRPKGICEDPRLFVDGISSHDLHQGQVGNCWFVAACSSLASRESLWQKVIPDWKEQEWDPEKPNAYAGIFHFHFWRFGEWVDVVIDDRLPTVNNQLIYCHSNSRNEFWCALVEKAYAKLAGCYQALDGGNTADALVDFTGGVSEPIDLTEGDFANDETKRNQLFERMLKVHSRGGLISASIKAVTAADMEARLACGLVKGHAYAVTDVRKVRLGHGLLAFFKSEKLDMIRLRNPWGEREWNGPWSDTSEEWQKVSKSEREKMGVTVQDDGEFWMTFEDVCRYFTDIIKCRVINTSHLSIHKTWEEARLHGAWTLHEDPRQNRGGGCINHKDTFFQNPQYIFEVKKPEDEVLICIQQRPKRSTRREGKGENLAIGFDIYKVEENRQYRMHSLQHKAASSIYINSRSVFLRTDQPEGRYVIIPTTFEPGHTGEFLLRVFTDVPSNCRELRLDEPPHTCWSSLCGYPQLVTQVHVLGAAGLKDSPTGANSYVIIKCEGDKVRSAVQKGTSTPEYNVKGIFYRKKLSQPITVQVWNHRVLKDEFLGQVHLKADPDNLQALHTLHLRDRNSRQPSNLPGTVAVHILSSTSLMAV

SEQ ID NO: 202 - protein, 2215 aa, Homo sapiens
MVILQQGDHVWMDLRLGQEFDVPIGAVVKLCDSGQVQVVDDEDNEHWISPQNATHIKPMHPTSVHGVEDMIRLGDLNEAGILRNLLIRYRDHLIYTYTGSILVAVNPYQLLSIYSPEHIRQYTNKKIGEMPPHIFAIADNCYFNMKRNSRDQCCIISGESGAGKTESTKLILQFLAAISGQHSWIEQQVLEATPILEAFGNAKTIRNDNSSRFGKYIDIHFNKRGAIEGAKIEQYLLEKSRVCRQALDERNYHVFYCMLEGMSEDQKKKLGLGQASDYNYLAMGNCITCEGRVDSQEYANIRSAMKVLMFTDTENWEISKLLAAILHLGNLQYEARTFENLDACEVLFSPSLATAASLLEVNPPDLMSCLTSRTLITRGETVSTPLSREQALDVRDAFVKGIYGRLFVWIVDKINAAIYKPPSQDVKNSRRSIGLLDIFGFENFAVNSFEQLCINFANEHLQQFFVRHVFKLEQEEYDLESIDWLHIEFTDNQDALDMIANKPMNIISLIDEESKFPKGTDTTMLHKLNSQHKLNANYIPPKNNHETQFGINHFAGIVYYETQGFLEKNRDTLHGDIIQLVHSSRNKFIKQIFQADVAMGAETRKRSPTLSSQFKRSLELLMRTLGACQPFFVRCIKPNEFKKPMLFDRHLCVRQLRYSGMMETIRIRRAGYPIRYSFVEFVERYRVLLPGVKPAYKQGDLRGTCQRMAEAVLGTHDDWQIGKTKIFLKDHHDMLLEVERDKAITDRVILLQKVIRGFKDRSNFLKLKNAATLIQRHWRGHNCRKNYGLMRLGFLRLQALHRSRKLHQQYRLARQRIIQFQARCRAYLVRKAFRHRLWAVLTVQAYARGMIARRLHQRLRAEYLWRLEAEKMRLAEEEKLRKEMSAKKAKEEAERKHQERLAQLAREDAERELKEKEAARRKKELLEQMERARHEPVNHSDMVDKMFGFLGTSGGLPGQEGQAPSGFEDLERGRREMVEEDLDAALPLPDEDEEDLSEYKFAKFAATYFQGTTTHSYTRRPLKQPLLYHDDEGDQLAALAVWITILRFMGDLPEPKYHTAMSDGSEKIPVMTKIYETLGKKTYKRELQALQGEGEAQLPEGQKKSSVRHKLVHLTLKKKSKLTEEVTKRLHDGESTVQGNSMLEDRPTSNLEKLHFIIGNGILRPALRDEIYCQISKQLTHNPSKSSYARGWILVSLCVGCFAPSEKFVKYLRNFIHGGPPGYAPYCEERLRRTFVNGTRTQPPSWLELQATKSKKPIMLPVTFMDGTTKTLLTDSATTAKELCNALADKISLKDRFGFSLYIALFDKVSSLGSGSDHVMDAISQCEQYAKEQGAQERNAPWRLFFRKEVFTPWHSPSEDNVATNLIYQQVVRGVKFGEYRCEKEDDLAELASQQYFVDYGSEMILERLLNLVPTYIPDREITPLKTLEKWAQLAIAAHKKGIYAQRRTDAQKVKEDVVSYARFKWPLLFSRFYEAYKFSGPSLPKNDVIVAVNWTGVYFVDEQEQVLLELSFPEIMAVSSSRECRVWLSLGCSDLGCAAPHSGWAGLTPAGPCSPCWSCRGAKTTAPSFTLATIKGDEYTFTSSNAEDIRDLVVTFLEGLRKRSKYVVALQDNPNPAGEESGFLSFAKGDLIILDHDTGEQVMNSGWANGINERTKQRGDFPTDSVYVMPTVTMPPREIVALVTMTPDQRQDVVRLLQLRTAEPEVRAKPYTLEEFSYDYFRPPPKHTLSRVMVSKARGKDRLWSHTREPLKQALLKKLLGSEELSQEACLAFIAVLKYMGDYPSKRTRSVNELTDQIFEGPLKAEPLKDEAYVQILKQLTDNHIRYSEERGWELLWLCTGLFPPSNILLPHVQRFLQSRKHCPLAIDCLQRLQKALRNGSRKYPPHLVEVEAIQHKTTQIFHKVYFPDDTDEAFEVESSTKAKDFCQNIATRLLLKSSEGFSLFVKIADKVLSVPENDFFFDFVRHLTDWIKKARPIKDGIVPSLTYQVFFMKKLWTTTVPGKDPMADSIFHYYQELPKYLRGYHKCTREEVLQLGALIYRVKFEEDKSYFPSIPKLLRELVPQDLIRQVSPDDWKRSIVAYFNKHAGKSKEEAKLAFLKLIFKWPTFGSAFFEVKQTTEPNFPEILLIAINKYGVSLIDPKTKDILTTHPFTKISNWSSGNTYFHITIGNLVRGSKLLCETSLGYKMDDLLTSYISQMLTAMSKQRGSRSGK

SEQ ID NO: 203 - protein, 195 aa, Homo sapiens
MENHKSNNKENITIVDISRKINQLPEAERNLLENGSVYVGLNAALCGLIANSLFRRILNVTKARIAAGLPMAGIPFLTTDLTYRCFVSFPLNTGDLDCETCTITRSGLTGLVIGGLYPVFLAIPVNGGLAARYQSALLPHKGNILSYWIRTSKPVFRKMLFPILLQTMFSAYLGSEQYKLLIKALQLSEPGKEIH

SEQ ID NO: 204 - protein, 537 aa, Homo sapiens
MAWRGAGPSVPGAPGGVGLSLGLLLQLLLLLGPARGFGDEEERRCDPIRISMCQNLGYNVTKMPNLVGHELQTDAELQLTTFTPLIQYGCSSQLQFFLCSVYVPMCTEKINIPIGPCGGMCLSVKRRCEPVLKEFGFAWPESLNCSKFPPQNDHNHMCMEGPGDEEVPLPHKTPIQPGEECHSVGTNSDQYIWVKRSLNCVLKCGYDAGLYSRSAKEFTDIWMAVWASLCFISTAFTVLTFLIDSSRFSYPERPIIFLSMCYNIYSIAYIVRLTVGRERISCDFEEAAEPVLIQEGLKNTGCAIIFLLMYFFGMASSIWWVILTLTWFLAAGLKWGHEAIEMHSSYFHIAAWAIPAVKTIVILIMRLVDADELTGLCYVGNQNLDALTGFVVAPLFTYLVIGTLFIAAGLVALFKIRSNLQKDGTKTDKLERLMVKIGVFSVLYTVPATCVIACYFYEISNWALFRYSADDSNMAVEMLKIFMSLLVGITSGMWIWSAKTLHTWQKCSNRLVNSGKVKREKRGNGWVKPGKGSETVV

SEQ ID NO: 205 - protein, 351 aa, Homo sapiens
MPSETLWEIAKAEVEKRGINGSEGDGAEIAEKFVFFIGSKNGGKTTIILRCLDRDEPPKPTLALEYTYGRRAKGHNTPKDIAHFWELGGGTSLLDLISIPITGDTLRTFSLVLVLDLSKPNDLWPTMENLLQATKSHVDKVIMKLGKTNAKAVSEMRQKIWNNMPKDHPDHELIDPFPVPLVIIGSKYDVFQDFESEKRKVICKTLRFVAHYYGASLMFTSKSEALLLKIRGVINQLAFGIDKSKSICVDQNKPLFITAGLDSFGQIGSPPVPENDIGKLHAHSPMELWKKVYEKLFPPKSINTLKDIKDPARDPQYAENEVDEMRIQKDLELEQYKRSSSKSWKQIELDS

SEQ ID NO: 206 - protein, 1460 aa, Homo sapiens
MAGRPLRIGDQLVLEEDYDETYIPSEQEILEFAREIGIDPIKEPELMWLAREGIVAPLPGEWKPCQDITGDIYYFNFANGQSMWDHPCDEHYRSLVIQERAKLSTSGAIKKKKKKKEKKDKKDRDPPKSSLALGSSLAPVHVPLGGLAPLRGLVDTPPSALRGSQSVSLGSSVESGRQLGELMLPSQGLKTSAYTKGLLGSIYEDKTALSLLGLGEETNEEDEEESDNQSVHSSSEPLRNLHLDIGALGGDFEYEESLRTSQPEEKKDVSLDSDAAGPPTPCKPSSPGADSSLSSAVGKGRQGSGARPGLPEKEENEKSEPKICRNLVTPKADPTGSEPAKASEKEAPEDTVDAGEEGSRREEAAKEPKKKASALEEGSSDASQELEISEHMKEPQLSDSIASDPKSFHGLDFGFRSRISEHLLDVDVLSPVLGGACRQAQQPLGIEDKDDSQSSQDELQSKQSKGLEERLSPPLPHEERAQSPPRSLATEEEPPQGPEGQPEWKEAEELGEDSAASLSLQLSLQREQAPSPPAACEKGKEQHSQAEELGPGQEEAEDPEEKVAVSPTPPVSPEVRSTEPVAPPEQLSEAALKAMEEAVAQVLEQDQRHLLESKQEKMQQLREKLCQEEEEEILRLHQQKEQSLSSLRERLQKAIEEEEARMREEESQRLSWLRAQVQSSTQADEDQIRAEQEASLQKLREELESQQKAERASLEQKNRQMLEQLKEEIEASEKSEQAALNAAKEKALQQLREQLEGERKEAVATLEKEHSAELERLCSSLEAKHREVVSSLQKKIQEAQQKEEAQLQKCLGQVEHRVHQKSYHVAGYEHELSSLLREKRQEVEGEHERRLDKMKEEHQQVMAKAREQYEAEERKQRAELLGHLTGELERLQRAHERELETVRQEQHKRLEDLRRRHREQERKLQDLELDLETRAKDVKARLALLEVQEETARREKQQLLDVQRQVALKSEEATATHQQLEEAQKEHTHLLQSNQQLREILDELQARKLKLESQVDLLQAQSQQLQKHFSSLEAEAQKKQHLLREVTVEENNASPHFEPDLHIEDLRKSLGTNQTKEVSSSLSQSKEDLYLDSLSSHNVWHLLSAEGVALRSAKEFLVQQTRSMRRRQTALKAAQQHWRHELASAQEVAKDPPGIKALEDMRKNLEKETRHLDEMKSAMRKGHNLLKKKEEKLNQLESSLWEEASDEGTLGGSPTKKAVTFDLSDMDSLSSESSESFSPPHREWWRQQRIDSTPSLTSRKIHGLSHSLRQISSQLSSVLSILDSLNPQSPPPLLASMPAQLPPRDPKSTPTPTYYGSLARFSALSSATPTSTQWAWDSGQGPRLPSSVAQTVDDFLLEKWRKYFPSGIPLLSNSPTPLESRLGYMSASEQLRLLQHSHSQVPEAGSTTFQGIIEANRRWLERVKNDPRLPLFSSTPKPKATLSLLQLGLDEHNRVKVYRF

SEQ ID NO: 207 - protein, 243 aa, Homo sapiens
MRPLLVLLLLGLAAGSPPLDDNKIPSLCPGHPGLPGTPGHHGSQGLPGRDGRDGRDGAPGAPGEKGEGGRPGLPGPRGDPGPRGEAGPAGPTGPAGECSVPPRSAFSAKRSESRVPPPSDAPLPFDRVLVNEQGHYDAVTGKFTCQVPGVYYFAVHATVYRASLQFDLVKNGESIASFFQFFGGWPKPASLSGGAMVRLEPEDQVWVQVGVGDYIGIYASIKTDSTFSGFLVYSDWHSSPVFA

SEQ ID NO: 208 - protein, 579 aa, Homo sapiens
MKDFSDVILCMEATESSKTEFCNPAFEPESGPPCPPPVFPEDASYSVPAPWHGRRPRGLRPDCRFSWLCVLLLSSLLLLLLGLLVAIILAQLQAAPPSGASHSPLPAGGLTTTTTTPTITTSQAAGTPKGQQESGVSPSPQSTCGGLLSGPRGFFSSPNYPDPYPPNTHCVWHIQVATDHAIQLKIEALSIESVASCLFDRLELSPEPEGPLLRVCGRVPPPTLNTNASHLLVVFVSDSSVEGFGFHAWYQAMAPGRGSCAHDEFRCDQLICLLPDSVCDGFANCADGSDETNCSAKFSGCGGNLTGLQGTFSTPSYLQQYPHQLLCTWHISVPAGHSIELQFHNFSLEAQDECKFDYVEVYETSSSGAFSLLGRFCGAEPPPHLVSSHHELAVLFRTDHGISSGGFSATYLAFNATENPCGPSELSCQAGGCKGVQWMCDMWRDCTDGSDDNCSGPLFPPPELACEPVQVEMCLGLSYNTTAFPNIWVGMITQEEVVEVLSGYKSLTSLPCYQHFRRLLCGLLVPRCTPLGSVLPPCRSVCQEAEHQCQSGLALLGTPWPFNCNRLPEAADLEACAQP

SEQ ID NO: 209 - protein, 1137 aa, Homo sapiens
MVCGCSALLPLPNPRPTMPATPNFLANPSSSSRWIPLQPMPVAWAFVQKTSALLWLLLLGTSLSPAWGQAKIPLETVKLWADTFGGDLYNTVTKYSGSLLLQKKYKDVESSLKIEEVDGLELVRKFSEDMENMLRRKVEAVQNLVEAAEEADLNHEFNESLVFDYYNSVLINERDEKGNFVELGAEFLLESNAHFSNLPVNTSISSVQLPTNVYNKDPDILNGVYMSEALNAVFVENFQRDPTLTWQYFGSATGFFRIYPGIKWTPDENGVITFDCRNRGWYIQAATSPKDIVILVDVSGSMKGLRMTIAKHTITTILDTLGENDFINIIAYNDYVHYIEPCFKGILVQADRDNREHFKLLVEELMVKGVGVVDQALREAFQILKQFQEAKQGSLCNQAIMLISDGAVEDYEPVFEKYNWPDCKVRVFTYLIGREVSFADRMKWIACNNKGYYTQISTLADTQENVMEYLHVLSRPMVINHDHDIIWTEAYMDSKLLSSQAQSLTLLTTVAMPVFSKKNETRSHGILLGVVGSDVALRELMKLAPRYKLGVHGYAFLNTNNGYILSHPDLRPLYREGKKLKPKPNYNSVDLSEVEWEDQAESLRTAMINRETGTLSMDVKVPMDKGKRVLFLTNDYFFTDISDTPFSLGVVLSRGHGEYILLGNTSVEEGLHDLLHPDLALAGDWIYCITDIDPDHRKLSQLEAMIRFLTRKDPDLECDEELVREVLFDAVVTAPMEAYWTALALNMSEESEHVVDMAFLGTRAGLLRSSLFVGSEKVSDRKFLTPEDEASVFTLDRFPLWYRQASEHPAGSFVFNLRWAEGPESAGEPMVVTASTAVAVTVDKRTAIAAAAGVQMKLEFLQRKFWAATRQCSTVDGPCTQSCEDSDLDCFVIDNNGFILISKRSRETGRFLGEVDGAVLTQLLSMGVFSQVTMYDYQAMCKPSSHHHSAAQPLVSPISAFLTATRWLLQELVLFLLEWSVWGSWYDRGAEAKSVFHHSHKHKKQDPLQPCDTEYPVFVYQPAIREANGIVECGPCQKVFVVQQIPNSNLLLLVTDPTCDCSIFPPVLQEATEVKYNASVKCDRMRSQKLRRRPDSCHAFHPEENAQDCGGASDTSASPPLLLLPVCAWGLLPQLLR

SEQ ID NO: 210 - protein, 340 aa, Homo sapiens [sequence omitted]

SEQ ID NO: 211 - protein, 83 aa, Homo sapiens
MSDNTTLPAPASNQGPTTPRKGPPKFKQRQTRQFKSKPPKKGVKGFGDDIPGMEGLGTDITVICPWEAFSHLELHELAQFGII

SEQ ID NO: 212 - protein, 1487 aa, Homo sapiens
MIRLGAPQTLVLLTLLVAAVLRCQGQDVQEAGSCVQDGQRYNDKDVWKPEPCRICVCDTGTVLCDDIICEDVKDCLSPEIPFGECCPICPTDLATASGQPGPKGQKGEPGDIKDIVGPKGPPGPQGPAGEQGPRGDRGDKGEKGAPGPRGRDGEPGTPGNPGPPGPPGPPGPPGLGGNFAAQMAGGFDEKAGGAQLGVMQGPMGPMGPRGPPGPAGAPGPQGFQGNPGEPGEPGVSGPMGPRGPPGPPGKPGDDGEAGKPGKAGERGPPGPQGARGFPGTPGLPGVKGHRGYPGLDGAKGEAGAPGVKGESGSPGENGSPGPMGPRGLPGERGRTGPAGAAGARGNDGQPGPAGPPGPVGPAGGPGFPGAPGAKGEAGPTGARGPEGAQGPRGEPGTPGSPGPAGASGNPGTDGIPGAKGSAGAPGIAGAPGFPGPRGPPGPQGATGPLGPKGQTGEPGIAGFKGEQGPKGEPGPAGPQGAPGPAGEEGKRGARGEPGGVGPIGPPGERGAPGNRGFPGQDGLAGPKGAPGERGPSGLAGPKGANGDPGRPGEPGLPGARGLTGRPGDAGPQGKVGPSGAPGEDGRPGPPGPQGARGQPGVMGFPGPKGANGEPGKAGEKGLPGAPGLRGLPGKDGETGAAGPPGPAGPAGERGEQGAPGPSGFQGLPGPPGPPGEGGKPGDQGVPGEAGAPGLVGPRGERGFPGERGSPGAQGLQGPRGLPGTPGTDGPKGASGPAGPPGAQGPPGLQGMPGERGAAGIAGPKGDRGDVGEKGPEGAPGKDGGRGLTGPIGPPGPAGANGEKGEVGPPGPAGSAGARGAPGERGETGPPGPAGFAGPPGADGQPGAKGEQGEAGQKGDAGAPGPQGPSGAPGPQGPTGVTGPKGARGAQGPPGATGFPGAAGRVGPPGSNGNPGPPGPPGPSGKDGPKGARGDSGPPGRAGEPGLQGPAGPPGEKGEPGDDGPSGAEGPPGPQGLAGQRGIVGLPGQRGERGFPGLPGPSGEPGKQGAPGASGDRGPPGPVGPPGLTGPAGEPGREGSPGADGPPGRDGAAGVKGDRGETGAVGAPGAPGPPGSPGPAGPTGKQGDRGEAGAQGPMGPSGPAGARGIQGPQGPRGDKGEAGEPGERGLKGHRGFTGLQGLPGPPGPSGDQGASGPAGPSGPRGPPGPVGPSGKDGANGIPGPIGPPGPRGRSGETGPAGPPGNPGPPGPPGPPGPGIDMSAFAGLGPREKGPDPLQYMRADQAAGGLRQHDAEVDATLKSLNNQIESIRSPEGSRKNPARTCRDLKLCHPEWKSGDYWIDPNQGCTLDAMKVFCNMETGETCVYPNPANVPKKNWWSSKSKEKKHIWFGETINGGFHFSYGDDNLAPNTANVQMTFLRLLSTEGSQNITYHCKNSIAYLDEAAGNLKKALLIQGSNDVEIRAEGNSRFTYTALKDGCTKHTGKWGKTVIEYRSQKTSRLPIIDIAPMDIGGPEQEFGVDIGPVCFL

SEQ ID NO: 213 - protein, 508 aa, Homo sapiens
MNCQQLWLGFLLPMTVSGRVLGLAEVAPVDYLSQYGYLQKPLEGSNNFKPEDITEALRAFQEASELPVSGQLDDATRARMRQPRCGLEDPFNQKTLKYLLLGRWRKKHLTFRILNLPSTLPPHTARAALRQAFQDWSNVAPLTFQEVQAGAADIRLSFHGRQSSYCSNTFDGPGRVLAHADIPELGSVHFDEDEFWTEGTYRGVNLRIIAAHEVGHALGLGHSRYSQALMAPVYEGYRPHFKLHPDDVAGIQALYGKKSPVIRDEEEEETELPTVPPVPTEPSPMPDPCSSELDAMMLGPRGKTYAFKGDYVWTVSDSGPGPLFRVSALWEGLPGNLDAAVYSPRTQWIHFFKGDKVWRYINFKMSPGFPKKLNRVEPNLDAALYWPLNQKVFLFKGSGYWQWDELARTDFSSYPKPIKGLFTGVPNQPSAAMSWQDGRVYFFKGKVYWRLNQQLRVEKGYPRNISHNWMHCRPRTIDTTPSGGNTTPSGTGITLDTTLSATETTFEY

SEQ ID NO: 214 - protein, 318 aa, Homo sapiens
MWLPLLLGALLWAVLWLLRDRQSLPASNAFVFITGCDSGFGRLLALQLDQRGFRVLASCLTPSGAEDLQRVASSRLHTTLLDITDPQSVQQAAKWVEMHVKEAGLFGLVNNAGVAGIIGPTPWLTRDDFQRVLNVNTMGPIGVTLALLPLLQQARGRVINITSVLGRLAANGGGYCVSKFGLEAFSDSLRRDVAHFGIRVSIVEPGFFRTPVTNLESLEKTLQACWARLPPATQAHYGGAFLTKYLKMQQRIMNLICDPDLTKVSRCLEHALTARHPRTRYSPGWDAKLLWLPASYLPASLVDAVLTWVLPKPAQAVY

SEQ ID NO: 215 - protein, 535 aa, Homo sapiens
MASLSLAPVNIFKAGADEERAETARLTSFIGAIAIGDLVKSTLGPKGMDKILLSSGRDASLMVTNDGATILKNIGVDNPAAKVLVDMSRVQDDEVGDGTTSVTVLAAELLREAESLIAKKIHPQTIIAGWREATKAAREALLSSAVDHGSDEVKFRQDLMNIAGTTLSSKLLTHHKDHFTKLAVEAVLRLKGSGNLEAIHIIKKLGGSLADSYLDEGFLLDKKIGVNQPKRIENAKILIANTGMDTDKIKIFGSRVRVDSTAKVAEIEHAEKEKMKEKVERILKHGINCFINRQLIYNYPEQLFGAAGVMAIEHADFAGVERLALVTGGEIASTFDHPELVKLGSCKLIEEVMIGEDKLIHFSGVALGEACTIVLRGATQQILDEAERSLHDALCVLAQTVKDSRTVYGGGCSEMLMAHAVTQLANRTPGKEAVAMESYAKALRMLPTIIADNAGYDSADLVAQLRAAHSEGNTTAGLDMREGTIGDMAILGITESFQVKRQVLLSAAEAAEVILRVDNIIKAAPRKRVPDHHPC

SEQ ID NO: 216 - protein, 723 aa, Homo sapiens
MLSSMAAAGSVKAALQVAEVLEAIVSCCVGPEGRQVLCTKPTGEVLLSRNGGRLLEALHLEHPIARMIVDCVSSHLKKTGDGAKTFIIFLCHLLRGLHAITDREKDPLMCENIQTHGRHWKNCSRWKFISQALLTFQTQILDGIMDQYLSRHFLSIFSSAKERTLCRSSLELLLEAYFCGRVGRNNHKFISQLMCDYFFKCMTCKSGIGVFELVDDHFVELNVGVTGLPVSDSRIIAGLVLQKDFSVYRPADGDMRMVIVTETIQPLFSTSGSEFILNSEAQFQTSQFWIMEKTKAIMKHLHSQNVKLLISSVKQPDLVSYYAGVNGISVVECLSSEEVSLIRRIIGLSPFVPPQAFSQCEIPNTALVKFCKPLILRSKRYVHLGLISTCAFIPHSIVLCGPVHGLIEQHEDALHGALKMLRQLFKDLDLNYMTQTNDQNGTSSLFIYKNSGESYQAPDPGNGSIQRPYQDTVAENKDALEKTQTYLKVHSNLVIPDVELETYIPYSTPTLTPTDTFQTVETLTCLSLERNRLTDYYEPLLKNNSTAYSTRGNRIEISYENLQVTNITRKGSMLPVSCKLPNMGTSQSYLSSSMPAGCVLPVGGNFEILLHYYLLNYAKKCHQSEETMVSMIIANALLGIPKVLYKSKTGKYSFPHTYIRAVHALQTNQPLVSSQTGLESVMGKYQLLTSVLQCLTKILTIDMVITVKRHPQKVHNQDSEDEL

SEQ ID NO: 217 - protein, 2479 aa, Homo sapiens
MPPNINWKEIMKVDPDDLPRQEELADNLLISLSKVEVNELKSEKQENVIHLFRITQSLMKMKAQEVELALEEVEKAGEEQAKFENQLKTKVMKLENELEMAQQSAGGRDTRFLRNEICQLEKQLEQKDRELEDMEKELEKEKKVNEQLALRNEEAENENSKLRRENKRLKKKNEQLCQDIIDYQKQIDSQKETLLSRRGEDSDYRSQLSKKNYELIQYLDEIQTLTEANEKIEVQNQEMRKNLEESVQEMEKMTDEYNRMKAIVHQTDNVIDQLKKENDHYQLQVQELTDLLKSKNEEDDPIMVAVNAKVEEWKLILSSKDDEIIEYQQMLHNLREKLKNAQLDADKSNVMALQQGIQERDSQIKMLTEQVEQYTKEMEKNTCIIEDLKNELQRNKGASTLSQQTHMKIQSTLDILKEKTKEAERTAELAEADAREKDKELVEALKRLKDYESGVYGLEDAVVEIKNCKNQIKIRDREIEILTKEINKLELKISDFLDENEALRERVGLEPKTMIDLTEFRNSKHLKQQQYRAENQILLKEIESLEEERLDLKKKIRQMAQERGKRSATSGLTTEDLNLTENISQGDRISERKLDLLSLKNMSEAQSKNEFLSRELIEKERDLERSRTVIAKFQNKLKELVEENKQLEEGMKEILQAIKEMQKDPDVKGGETSLIIPSLERLVNAIESKNAEGIFDASLHLKAQVDQLTGRNEELRQELRESRKEAINYSQQLAKANLKIDHLEKETSLLRQSEGSNVVFKGIDLPDGIAPSSASIINSQNEYLIHLLQELENKEKKLKNLEDSLEDYNRKFAVIRHQQSLLYKEYLSEKETWKTESKTIKEEKRKLEDQVQQDAIKVKEYNNLLNALQMDSDEMKKILAENSRKITVLQVNEKSLIRQYTTLVELERQLRKENEKQKNELLSMEAEVCEKIGCLQRFKEMAIFKIAALQKVVDNSVSLSELELANKQYNELTAKYRDILQKDNMLVQRTSNLEHLECENISLKEQVESINKELEITKEKLHTIEQAWEQETKLGNESSMDKAKKSITNSDIVSISKKITMLEMKELNERQRAEHCQKMYEHLRTSLKQMEERNFELETKFAELTKINLDAQKVEQMLRDELADSVSKAVSDADRQRILELEKNEMELKVEVSKLREISDIARRQVEILNAQQQSRDKEVESLRMQLLDYQAQSDEKSLIAKLHQHNVSLQLSEATALGKLESITSKLQKMEAYNLRLEQKLDEKEQALYYARLEGRNRAKHLRQTIQSLRRQFSGALPLAQQEKFSKTMIQLQNDKLKIMQEMKNSQQEHRNMENKTLEMELKLKGLEELISTLKDTKGAQKVINWHMKIEELRLQELKLNRELVKDKEEIKYLNNIISEYERTISSLEEEIVQQNKFHEERQMAWDQREVDLERQLDIFDRQQNEILNAAQKFEEATGSIPDPSLPLPNQLEIALRKIKENIRIILETRATCKSLEEKLKEKESALRLAEQNILSRDKVINELRLRLPATAEREKLIAELGRKEMEPKSHHTLKIAHQTIANMQARLNQKEEVLKKYQRLLEKAREEQREIVKKHEEDLHILHHRLELQADSSLNKFKQTAWDLMKQSPTPVPTNKHFIRLAEMEQTVAEQDDSLSSLLVKLKKVSQDLERQREITELKVKEFENIKLQLQENHEDEVKKVKAEVEDLKYLLDQSQKESQCLKSELQAQKEANSRAPTTTMRNLVERLKSQLALKEKQQKALSRALLELRAEMTAAAEERIISATSQKEAHLNVQQIVDRHTRELKTQVEDLNENLLKLKEALKTSKNRENSLTDNLNDLNNELQKKQKAYNKILREKEEIDQENDELKRQIKRLTSGLQGKPLTDNKQSLIEELQRKVKKLENQLEGKVEEVDLKPMKEKNAKEELIRWEEGKKWQAKIEGIRNKLKEKEGEVFTLTKQLNTLKDLFAKADKEKLTLQRKLKTTGMTVDQVLGIRALESEKELEELKKRNLDLENDILYMRAHQALPRDSVVEDLHLQNRYLQEKLHALEKQFSKDTYSKPSISGIESDDHCQREQELQKENLKLSSENIELKFQLEQANKDLPRLKNQVRDLKEMCEFLKKEKAEVQRKLGHVRGSGRSGKTIPELEKTIGLMKKVVEKVQRENEQLKKASGILTSEKMANIEQENEKLKAELEKLKAHLGHQLSMHYESKTKGTEKIIAENERLRKELKKETDAAEKLRIAKNNLEILNEKMTVQLEETGKRLQFAESRGPQLEGADSKSWKSIVVTRMYETKLKELETDIAKKNQSITDLKQLVKEATEREQKVNKYNEDLEQQIKILKHVPEGAETEQGLKRELQVLRLANHQLDKEKAELIHQIEANKDQSGAESTIPDADQLKEKIKDLETQLKMSDLEKQHLKEEIKKLKKELENFDPSFFEEIEDLKYNYKEEVKKNILLEEKVKKLSEQLGVELTSPVAASEEFEDEEESPVNFPIY

SEQ ID NO: 218 - protein, 478 aa, Homo sapiens [sequence omitted]

SEQ ID NO: 219 - protein, 396 aa, Homo sapiens
MLSEVLLVSAPGKVILHGEHAVVHGKVALAVSLNLRTFLRLQPHSNGKVDLSLPNIGIKRAWDVARLQSLDTSFLEQGDVTTPTSEQVEKLKEVAGLPDDCAVTERLAVLAFLYLYLSICRKQRALPSLDIVVWSELPPGAGLGSSAAYSVCLAAALLTVCEEIPNPLKDGDCVNRWTKEDLELINKWAFQGERMIHGNPSGVDNAVSTWGGALRYHQGKISSLKRSPALQILLTNTKVPRNTRALVAGVRNRLLKFPEIVAPLLTSIDAISLECERVLGEMGEAPAPEQYLVLEELIDMNQHHLNALGVGHASLDQLCQVTRARGLHSKLTGAGGGGCGITLLKPGLEQPEVEATKQALTSCGFDCLETSIGAPGVSIHSATSLDSRVQQALDGL

SEQ ID NO: 220 - protein, 676 aa, Homo sapiens
MSDQIKFIMDSLNKEPFRKNYNLITFDSLEPMQLLQVLSDVLAEIDPKQLVDIREEMPEQTAKRMLSLLGILKYKPSGNATDMSTFRQGLVIGSKPVIYPVLHWLLQRTNELKKRAYLARFLIKLEVPSEFLQDETVADTNKQYEELMEAFKTLHKEYEQLKISGFSTAEIRKDISAMEEEKDQLIKRVEHLKKRVETAQNHQWMLKIARQLRVEKEREEYLAQQKQEQKNQLFHAVQRLQRVQNQLKSMRQAAADAKPESLMKRLEEEIKFNLYMVTEKFPKELENKKKELHFLQKVVSEPAMGHSDLLELESKINEINTEINQLIEKKMMRNEPIEGKLSLYRQQASIISRKKEAKAEELQEAKEKLASLEREASVKRNQTREFDGTEVLKGDEFKRYVNKLRSKSTVFKKKHQIIAELKAEFGLLQRTEELLKQRHENIQQQLQTMEEKKGISGYSYTQEELERVSALKSEVDEMKGRTLDDMSEMVKKLYSLVSEKKSALASVIKELRQLRQKYQELTQECDEKKSQYDSCAAGLESNRSKLEQEVRRLREECLQEESRYHYTNCMIKNLEVQLRRATDEMKAYISSDQQEKRKAIREQYTKNTAEQENLGKKLREKQKVIRESHGPNMKQAKMWRDLEQLMECKKQCFLKQQSQTSIGQVIQEGGEDRLIL

SEQ ID NO: 221 - protein, 166 aa, Homo sapiens
MSTVGLFHFPTPLTRICPAPWGLRLWEKLTLLSPGIAVTPVQMAGKKDYPALLSLDENELEEQFVKGHGPGGQATNKTSNCVVLKHIPSGIVVKCHQTRSVDQNRKLARKILQEKVDVFYNGENSPVHKEKREAAKKKQERKKRAKETLEKKKLLKELWESSKKVH

SEQ ID NO: 222 - protein, 266 aa, Homo sapiens
MVKVTFNSALAQKEAKKDEPKSGEEALIIPPDAVAVDCKDPDDVVPVGQRRAWCWCMCFGLAFMLAGVILGGAYLYKYFALQPDDVYYCGIKYIKDDVILNEPSADAPAALYQTIEENIKIFEEEEVEFISVPVPEFADSDPANIVHDFNKKLTAYLDLNLDKCYVIPLNTSIVMPPRNLLELLINIKAGTYLPQSYLIHEHMVITDRIENIDHLGFFIYRLCHDKETYKLQRRETIKGIQKREASNCFAIRHFENKFAVETLICS

SEQ ID NO: 223 - protein, 928 aa, Homo sapiens
MPPKTPRKTAATAAAAAAEPPAPPPPPPPEEDPEQDSGPEDLPLVRLEFEETEEPDFTALCQKLKIPDHVRERAWLTWEKVSSVDGVLGGYIQKKKELWGICIFIAAVDLDEMSFTFTELQKNIEISVHKFFNLLKEIDTSTKVDNAMSRLLKKYDVLFALFSKLERTCELIYLTQPSSSISTEINSALVLKVSWITFLLAKGEVLQMEDDLVISFQLMLCVLDYFIKLSPPMLLKEPYKTAVIPINGSPRTPRRGQNRSARIAKQLENDTRIIEVLCKEHECNIDEVKNVYFKNFIPFMNSLGLVTSNGLPEVENLSKRYEEIYLKNKDLDARLFLDHDKTLQTDSIDSFETQRTPRKSNLDEEVNVIPPHTPVRTVMNTIQQLMMILNSASDQPSENLISYFNNCTVNPKESILKRVKDIGYIFKEKFAKAVGQGCVEIGSQRYKLGVRLYYRVMESMLKSEEERLSIQNFSKLLNDNIFHMSLLACALEVVMATYSRSTSQNLDSGTDLSFPWILNVLNLKAFDFYKVIESFIKAEGNLTREMIKHLERCEHRIMESLAWLSDSPLFDLIKQSKDREGPTDHLESACPLNLPLQNNHTAADMYLSPVRSPKKKGSTTRVNSTANAETQATSAFQTQKPLKSTSLSLFYKKVYRLAYLRLNTLCERLLSEHPELEHIIWTLFQHTLQNEYELMRDRHLDQIMMCSMYGICKVKNIDLKFKIIVTAYKDLPHAVQETFKRVLIKEEEYDSIIVFYNSVFMQRLKTNILQYASTRPPTLSPIPHIPRSPYKFPSSPLRIPGGNIYISPLKSPYKISEGLPTPTKMTPRSRILVSIGESFGTSEKFQKINQMVCNSDRVLKRSAEGSNPPKPLKKLRFDIEGSDEADGSKHLPGESKFQQKLAEMTSTRTRMQKQKMNDSMDTSNKEEK

SEQ ID NO: 224 - protein, 531 aa, Homo sapiens
MVDVGKWPIFTLLSPQEIASIRKACVFGTSASEALYVTDNDEVFVFGLNYSNCLGTGDNQSTLVPKKLEGLCGKKIKSLSYGSGPHVLLSTEDGVVYAWGHNGYSQLGNGTTNQGIAPVQVCTNLLIKQVVEVACGSHHSMALAADGEVFAWGYNNCGQVGSGSTANQPTPRKVTNCLHIKRVVGIACGQTSSMAVLDNGEVYGWGYNGNGQLGLGNNGNQLTPVRVAALHSVCVNQIVCGYAHTLALTDEGLLYAWGANTYGQLGTGNKNNLLSPAHIMVEKERVVEIAACHSAHTSAAKTQGGHVYMWGQCRGQSVILPHLTHFSCTDDVFACFATPAVSWRLLSVEHEDFLTVAESLKKEFDSPETADLKFRIDGKYIHVHKAVLKIRCEHFRSMFQSYWNEDMKEVIEIDQFSYPVYRAFLQYLYTDTVDLPPEDAIGLLDLATSYCENRLKKLCQHIIKRGITVENAFSLFSAAVRYDAEDLEEFCFKFCINHLTEVTQTAAFWQMDGPLLKEFIAKASKCGAFKN

SEQ ID NO: 225 - protein, 563 aa, Homo sapiens
MDFGSLETVVANSAFIAARGSFDGSSSQPSRDKKYLAKLKLPPLSKCESLRDSLSLEFESVCLEQPIGKKLFQQFLQSAEKHLPALELWKDIEDYDTADNDLQPQKAQTILAQYLDPQAKLFCSFLDEGIVAKFKEGPVEIQDGLFQPLLQATLAHLGQAPFQEYLGSLYFLRFLQWKWLEAQPMGEDWFLDFRVLGKGGFGEVSACQMKATGKLYACKKLNKKRLKKRKGYQGAMVEKKILMKVHSRFIVSLAYAFETKADLCLVMTIMNGGDIRYHIYNVNEENPGFPEPRALFYTAQIICGLEHLHQRRIVYRDLKPENVLLDNDGNVRISDLGLAVELLDGQSKTKGYAGTPGFMAPELLQGEEYDFSVDYFALGVTLYEMIAARGPFRARGEKVENKELKHRIISEPVKYPDKFSQASKDFCEALLEKDPEKRLGFRDETCDKLRAHPLFKDLNWRQLEAGMLMPPFIPDSKTVYAKDIQDVGAFSTVKGVAFDKTDTEFFQEFATGNCPIPWQEEMIETGIFGELNVWRSDGQMPDDMKGISGGSSSSSKSGMCLVS

SEQ ID NO: 226 - protein, 1286 aa, Homo sapiens
MSHLVDPTSGDLPVRDIDAIPLVLPASKGKNMKTQPPLSRMNREELEDSFFRLREDHMLVKELSWKQQDEIKRLRTTLLRLTAAGRDLRVAEEAAPLSETARRGQKAGWRQRLSMHQRPQMHRLQGHFHCVGPASPRRAQPRVQVGHRQLHTAGAPVPEKPKRGPRDRLSYTAPPSFKEHATNENRGEVASKPSELVSGSNSIISFSSVISMAKPIGLCMPNSAHIMASNTMQVEEPPKSPEKMWPKDENFEQRSSLECAQKAAELRASIKEKVELIRLKKLLHERNASLVMTKAQLTEVQEAYETLLQKNQGILSAAHEALLKQVNELRAELKEESKKAVSLKSQLEDVSILQMTLKEFQERVEDLEKERKLLNDNYDKLLESMLDSSDSSSQPHWSNELIAEQLQQQVSQLQDQLDAELEDKRKVLLELSREKAQNEDLKLEVTNILQKHKQEVELLQNAATISQPPDRQSEPATHPAVLQENTQIEPSEPKNQEEKKLSQVLNELQVSHAETTLELEKTRDMLILQRKINVCYQEELEAMMTKADNDNRDHKEKLERLTRLLDLKNNRIKQLEGILRSHDLPTSEQLKDVAYGTRPLSLCLETLPAHGDEDKVDISLLHQGENLFELHIHQAFLTSAALAQAGDTQPTTFCTYSFYDFETHCTPLSVGPQPLYDFTSQYVMETDSLFLHYLQEASARLDIHQAMASEHSTLAAGWICFDRVLETVEKVHGLATLIGAGGEEFGVLEYWMRLRFPIKPSLQACNKRKKAQVYLSTDVLGGRKAQEEEFRSESWEPQNELWIEITKCCGLRSRWLGTQPSPYAVYRFFTFSDHDTAIIPASNNPYFRDQARFPVLVTSDLDHYLRREALSIHVFDDEDLEPGSYLGRARVPLLPLAKNESIKGDFNLTDPAEKPNGSIQVQLDWKFPYIPPESFLKPEAQTKGKDTKDSSKISSEEEKASFPSQDQMASPEVPIEAGQYRSKRKPPHGGERKEKEHQVVSYSRRKHGKRIGVQGKNRMEYLSLNILNGNTPEQVNYTEWKFSETNSFIGDGFKNQHEEEEMTLSHSALKQKEPLHPVNDKESSEQGSEVSEAQTTDSDDVIVPPMSQKYPKADSEKMCIEIVSLAFYPEAEVMSDENIKQVYVEYKFYDLPLSETETPVSLRKPRAGEEIHFHFSKVIDLDPQEQQGRRRFLFDMLNGQDPDQGHLKFTVVSDPLDEEKKECEEVGYAYLQLWQILESGRDILEQELDIVSPEDLATPIGRLKVSLQAAAVLHAIYKEMTEDLFS

SEQ ID NO: 227 - protein, 237 aa, Homo sapiens
MALPPSPLAMEYVNDFDLMKFEVKREPSEGRPGPPTASLGSTPYSSVPPSPTFSEPGMVGATEGTRPGLEELYWLATLQQQLGAGEALGLSPEEAMELLQGQGPVPVDGPHGYYPGSPEETGAQHVQLAERFSDAALVSMSVRELNRQLRGCGRDEALRLKQRRRTLKNRGYAQACRSKRLQQRRGLEAERARLAAQLDALRAEVARLARERDLYKARCDRLTSSGPGSGDPSHLFL

SEQ ID NO: 228 - protein, 289 aa, Homo sapiens
MMSYLKQPPYAVNGLSLTTSGMDLLHPSVGYPATPRKQRRERTTFTRAQLDVLEALFAKTRYPDIFMREEVALKINLPESRVQVWFKNRRAKCRQQQQQQQNGGQNKVRPAKKKTSPAREVSSESGTSGQFTPPSSTSVPTIASSSAPVSIWSPASISPLSDPLSTSSSCMQRSYPMTYTQASGYSQGYAGSTSYFGGMDCGSYLTPMHHQLPGPGATLSPMGTNAVTSHLNQSPASLSTQGYGASSLGFNSTTDCLDYKDQTASWKLNFNADCLDYKDQTSSWKFQVL

SEQ ID NO: 229 - protein, 318 aa, Homo sapiens
MVELMFPLLLLLLPFLLYMAAPQIRKMLSSGVCTSTVQLPGKVVVVTGANTGIGKETAKELAQRGARVYLACRDVEKGELVAKEIQTTTGNQQVLVRKLDLSDTKSIRAFAKGFLAEEKHLHVLINNAGVMMCPYSKTADGFEMHIGVNHLGHFLLTHLLLEKLKESAPSRIVNVSSLAHHLGRIHFHNLQGEKFYNAGLAYCHSKLANILFTQELARRLKGSGVTTYSVHPGTVQSELVRHSSFMRWMWWLFSFFIKTPQQGAQTSLHCALTEGLEILSGNHFSDCHVAWVSAQARNETIARRLWDVSCDLLGLPID

SEQ ID NO: 230 - protein, 316 aa, Homo sapiens
MLVTLGLLTSFFSFLYMVAPSIRKFFAGGVCRTNVQLPGKVVVITGANTGIGKETARELASRGARVYIACRDVLKGESAASEIRVDTKNSQVLVRKLDLSDTKSIRAFAEGFLAEEKQLHILINNAGVMMCPYSKTADGFETHLGVNHLGHFLLTYLLLERLKVSAPARVVNVSSVAHHIGKIPFHDLQSEKRYSRGFAYCHSKLANVLFTRELAKRLQGTGVTTYAVHPGVVRSELVRHSSLLCLLWRLFSPFVKTAREGAQTSLHCALAEGLEPLSGKYFSDCKRTWVSPRARNNKTAERLWNVSCELLGIRWE

SEQ ID NO: 231 - protein, 1281 aa, Homo sapiens
MPIVMARDLEETASSSEDEEVISQEDHPCIMWTGGCRRIPVLVFHADAILTKDNNIRVIGERYHLSYKIVRTDSRLVRSILTAHGFHEVHPSSTDYNLMWTGSHLKPFLLRTLSEAQKVNHFPRSYELTRKDRLYKNIIRMQHTHGFKAFHILPQTFLLPAEYAEFCNSYSKDRGPWIVKPVASSRGRGVYLINNPNQISLEENILVSRYINNPLLIDDFKFDVRLYVLVTSYDPLVIYLYEEGLARFATVRYDQGAKNIRNQFMHLTNYSVNKKSGDYVSCDDPEVEDYGNKWSMSAMLRYLKQEGRDTTALMAHVEDLIIKTIISAELAIATACKTFVPHRSSCFELYGFDVLIDSTLKPWLLEVNLSPSLACDAPLDLKIKASMISDMFTVVGFVCQDPAQRASTRPIYPTFESSRRNPFQKPQRCRPLSASDAEMKNLVGSAREKGPGKLGGSVLGLSMEEIKVLRRVKEENDRRGGFIRIFPTSETWEIYGSYLEHKTSMNYMLATRLFQDRMTADGAPELKIESLNSKAKLHAALYERKLLSLEVRKRRRRSSRLRAMRPKYPVITQPAEMNVKTETESEEEEEVALDNEDEEQEASQEESAGFLRENQAKYTPSLTALVENTPKENSMKVREWNNKGGHCCKLETQELEPKFNLMQILQDNGNLSKMQARIAFSAYLQHVQIRLMKDSGGQTFSASWAAKEDEQMELVVRFLKRASNNLQHSLRMVLPSRRLALLERRRILAHQLGDFIIVYNKETEQMAEKKSKKKVEEEEEDGVNMENFQEFIRQASEAELEEVLTFYTQKNKSASVFLGTHSKISKNNNNYSDSGAKGDHPETIMEEVKIKPPKQQQTTEIHSDKLSRFTTSAEKEAKLVYSNSSSGPTATLQKIPNTHLSSVTTSDLSPGPCHHSSLSQIPSAIPSMPHQPTILLNTVSASASPCLHPGAQNIPSPTGLPRCRSGSHTIGPFSSFQSAAHIYSQKLSRPSSAKAGSCYLNKHHSGIAKTQKEGEDASLYSKRYNQSMVTAELQRLAEKQAARQYSPSSHINLLTQQVTNLNLATGIINRSSASAPPTLRPIISPSGPTWSTQSDPQAPENHSSSPGSRSLQTGGFAWEGEVENNVYSQATGVVPQHKYHPTAGSYQLQFALQQLEQQKLQSRQLLDQSRARHQAIFGSQTLPNSNLWTMNNGAGCRISSATASGQKPTTLPQKVVPPPSSCASLVPKPPPNHEQVLRRATSQKASKGSSAEGQLNGLQSSLNPAAFVPITSSTDPAHTKI

SEQ ID NO: 232 - protein, 599 aa, Homo sapiens
MDGSRRVRATSVLPRYGPPCLFKGHLSTKSNAFCTDSSSLRLSTLQLVKNHMAVHYNKILSAKAAVDCSVPVSVSTSIKYADQQRREKLKKELAQCEKEFKLTKTAMRANYKNNSKSLFNTLQKPSGEPQIEDDMLKEEMNGFSSFARSLVPSSERLHLSLHKSSKVITNGPEKNSSSSPSSVDYAASGPRKLSSGALYGRRPRSTFPNSHRFQLVISKAPSGDLLDKHSELFSNKQLPFTPRTLKTEAKSFLSQYRYYTPAKRKKDFTDQRIEAETQTELSFKSELGTAETKNMTDSEMNIKQASNCVTYDAKEKIAPLPLEGHDSTWDEIKDDALQHSSPRAMCQYSLKPPSTRKIYSDEEELLYLSFIEDVTDEILKLGLFSNRFLERLFERHIKQNKHLEEEKMRHLLHVLKVDLGCTSEENSVKQNDVDMLNVFDFEKAGNSEPNELKNESEVTIQQERQQYQKALDMLLSAPKDENEIFPSPTEFFMPIYKSKHSEGVIIQQVNDETNLETSTLDENHPSISDSLTDRETSVNVIEGDSDPEKVEISNGLCGLNTSPSQSVQFSSVKGDNNHDMELSTLKIMEMSIEDCPLDV

SEQ ID NO: 233 - protein, 515 aa, Homo sapiens
MSSEMEPLLLAWSYFRRRKFQLCADLCTQMLEKSPYDQEPDPELPVHQAAWILKARALTEMVYIDEIDVDQEGIAEMMLDENAIAQVPRPGTSLKLPGTNQTGGPSQAVRPITQAGRPITGFLRPSTQSGRPGTMEQAIRTPRTAYTARPITSSSGRFVRLGTASMLTSPDGPFINLSRLNLTKYSQKPKLAKALFEYIFHHENDVKTALDLAALSTEHSQYKDWWWKVQIGKCYYRLGMYREAEKQFKSALKQQEMVDTFLYLAKVYVSLDQPVTALNLFKQGLDKFPGEVTLLCGIARIYEEMNNMSSAAEYYKEVLKQDNTHVEAIACIGSNHFYSDQPEIALRFYRRLLQMGIYNGQLFNNLGLCCFYAQQYDMTLTSFERALSLAENEEEAADVWYNLGHVAVGIGDTNLAHQCFRLALVNNNNHAEAYNNLAVLEMRKGHVEQARALLQTASSLAPHMYEPHFNFATISDKIGDLQRSYVAAQKSEAAFPDHVDTQHLIKQLRQHFAML

SEQ ID NO: 234 - protein, 448 aa, Homo sapiens
MPGIKRILTVTILALCLPSPGNAQAQCTNGFDLDRQSGQCLDIDECRTIPEACRGDMMCVNQNGGYLCIPRTNPVYRGPYSNPYSTPYSGPYPAAAPPLSAPNYPTISRPLICRFGYQMDESNQCVDVDECATDSHQCNPTQICINTEGGYTCSCTDGYWLLEGQCLDIDECRYGYCQQLCANVPGSYSCTCNPGFTLNEDGRSCQDVNECATENPCVQTCVNTYGSFICRCDPGYELEEDGVHCSDMDECSFSEFLCQHECVNQPGTYFCSCPPGYILLDDNRSCQDINECEHRNHTCNLQQTCYNLQGGFKCIDPIRCEEPYLRISDNRCMCPAENPGCRDQPFTILYRDMDVVSGRSVPADIFQMQATTRYPGAYYIFQIKSGNEGREFYMRQTGPISATLVMTRPIKGPREIQLDLEMITVNTVINFRGSSVIRLRIYVSQYPF

SEQ ID NO: 235 - protein, 1603 aa, Homo sapiens
MKDSNRCCCGQFTNQHIPPLPSATPSKNEEESKQVETQPEKWSVAKHTQSYPTDSYGVLEFQGGGYSNKAMYIRVSYDTKPDSLLHLMVKDWQLELPKLLISVHGGLQNFEMQPKLKQVFGKGLIKAAMTTGAWIFTGGVSTGVISHVGDALKDHSSKSRGRVCAIGIAPWGIVENKEDLVGKDVTRVYQTMSNPLSKLSVLNNSHTHFILADNGTLGKYGAEVKLRRLLEKHISLQKINTRLGQGVPLVGLVVEGGPNVVSIVLEYLQEEPPIPVVICDGSGRASDILSFAHKYCEEGGIINESLREQLLVTIQKTFNYNKAQSHQLFAIIMECMKKKELVTVFRMGSEGQQDIEMAILTALLKGTNVSAPDQLSLALAWNRVDIARSQIFVFGPHWPPLGSLAPPTDSKATEKEKKPPMATTKGGRGKGKGKKKGKVKEEVEEETDPRKIELLNWVNALEQAMLDALVLDRVDFVKLLIENGVNMQHFLTIPRLEELYNTRLGPPNTLHLLVRDVKKSNLPPDYHISLIDIGLVLEYLMGGAYRCNYTRKNFRTLYNNLFGPKRPKALKLLGMEDDEPPAKGKKKKKKKKEEEIDIDVDDPAVSRFQYPFHELMVWAVLMKRQKMAVFLWQRGEESMAKALVACKLYKAMAHESSESDLVDDISQDLDNNSKDFGQLALELLDQSYKHDEQIAMKLLTYELKNWSNSTCLKLAVAAKHRDFIAHTCSQMLLTDMWMGRLRMRKNPGLKVIMGILLPPTILFLEFRTYDDFSYQTSKENEDGKEKEEENTDANADAGSRKGDEENEHKKQRSIPIGTKICEFYNAPIVKFWFYTISYLGYLLLFNYVILVRMDGWPSLQEWIVISYIVSLALEKIREILMSEPGKLSQKIKVWLQEYWNITDLVAISTFMIGAILRLQNQPYMGYGRVIYCVDIIFWYIRVLDIFGVNKYLGPYVMMIGKMMIDMLYFVVIMLVVLMSFGVARQAILHPEEKPSWKLARNIFYMPYWMIYGEVFADQIDLYAMEINPPCGENLYDEEGKRLPPCIPGAWLTPALMACYLLVANILLVNLLIAVFNNTFFEVKSISNQVWKFQRYQLIMTFHDRPVLPPPMIILSHIYIIIMRLSGRCRKKREGDQEERDRGLKLFLSDEELKRLHEFEEQCVQEHFREKEDEQQSSSDERIRVTSERVENMSMRLEEINERETFMKTSLQTVDLRLAQLEELSNRMVNALENLAGIDRSDLIQARSRASSECEATYLLRQSSINSADGYSLYRYHFNGEELLFEDTSLSTSPGTGVRKKTCSFRIKEEKDVKTHLVPECQNSLHLSLGTSTSATPDGSHLAVDDLKNAEESKLGPDIGISKEDDERQTDSKKEETISPSLNKTDVIHGQDKSDVQNTQLTVETTNIEGTISYPLEETKITRYFPDETINACKTMKSRSFVYSRGRKLVGGVNQDVEYSSITDQQLTTEWQCQVQKITRSHSTDIPYIVSEAAVQAEHKEQFADMQDEHHVAEAIPRIPRLSLTITDRNGMENLLSVKPDQTLGFPSLRSKSLHGHPRNVKSIQGKLDRSGHASSVSSLVIVSGMTAEEKKVKKEKASTETEC

SEQ ID NO: 236 - protein, 667 aa, Homo sapiens
MIHELLLALSGYPGSIFTWNKRSGLQVSQDFPFLHPSETSVLNRLCRLGTDYIRFTEFIEQYTGHVQQQDHHPSQQGQGGLHGIYLRAFCTGLDSVLQPYRQALLDLEQEFLGDPHLSISHVNYFLDQFQLLFPSVMVVVEQIKSQKIHGCQILETVYKHSCGGLPPVRSALEKILAVCHGVMYKQLSAWMLHGLLLDQHEEFFIKQGPSSGNVSAQPEEDEEDLGIGGLTGKQLRELQDLRLIEEENMLAPSLKQFSLRVEILPSYIPVRVAEKILFVGESVQMFENQNVNLTRKGSILKNQEDTFAAELHRLKQQPLFSLVDFEQVVDRIRSTVAEHLWKLMVEESDLLGQLKIIKDFYLLGRGELFQAFIDTAQHMLKTPPTAVTEHDVNVAFQQSAHKVLLDDDNLLPLLHLTIEYHGKEHKADATQAREGPSRETSPREAPASGWAALGLSYKVQWPLHILFTPAVLEKYNVVFKYLLSVRRVQAELQHCWALQMQRKHLKSNQTDAIKWRLRNHMAFLVDNLQYYLQVDVLESQFSQLLHQINSTRDFESIRLAHDHFLSNLLAQSFILLKPVFHCLNEILDLCHSFCSLVSQNLGPLDERGAAQLSILVKGFSRQSSLLFKILSSVRNHQINSDLAQLLLRLDYNKYYTQAGGTLGSFGM

SEQ ID NO: 237 - protein, 1099 aa, Homo sapiens
MGKLIRMGPQERWLLRTKRLHWSRLLFLLGMLIIGSTYQHLRRPRGLSSLWAAVSSHQPIKLASRDLSSEEMMMMSSSPSKPSSEMGGKMLVPQASVGSDEATLSMTVENIPSMPKRTAKMIPTTTKNNYSPTAAGTERRKEDTPTSSRTLTYYTSTSSRQIVKKYTPTPRGEMKSYSPTQVREKVKYTPSPRGRRVGTYVPSTFMTMETSHAITPRTTVKDSDITATYKILETNSLKRIMEETTPTTLKGMFDSTPTFLTHEVEANVLTSPRSVMEKNNLFPPRRVESNSSAHPWGLVGKSNPKTPQGTVLLHTPATSEGQVTISTMTGSSPAETKAFTAAWSLRNPSPRTSVSAIKTAPAIVWRLAKKPSTAPSTSTTPTVRAKLTMQVHHCVVVKPTPAMLTTPSPSLTTALLPEELSPSPSVLPPSLPDLHPKGEYPPDLFSVEERRQGWVVLHVFGMMYVFVALAIVCDEYFVPALGVITDKLQISEDVAGATFMAAGGSAPELFTSLIGVFISHSNVGIGTIVGSAVFNILFVIGTCSLFSREILNLTWWPLFRDVSFYILDLIMLILFFLDSLIAWWESLLLLLAYAFYVFTMKWNKHIEVWVKEQLSRRPVAKVMALEDLSKPGDGAIAVDELQDNKKLKLPSLLTRGSSSTSLHNSTIRSTIYQLMLHSLDPLREVRLAKEKEEESLNQGARAQPQAKAESKPEEEEPAKLPAVTVTPAPVPDIKGDQKENPGGQEDVAEAESTGEMPGEEGETAGEGETEEKSGGETQPEGEGETETQGKGEECEDENEAEGKGDNEGEDEGEIHAEDGEMKGNEGETESQELSAENHGEAKNDEKGVEDGGGSDGGDSEEEEEEEEEQEEEEEEEEQEEEEEEEEEEEEKGNEEPLSLDWPETRQKQAIYLFLLPIVFPLWLTVPDVRRQESRKFFVFTFLGSIMWIAMFSYLMVWWAHQVGETIGISEEIMGLTILAAGTSIPDLITSVIVARKGLGDMAVSSSVGSNIFDITVGLPVPWLLFSLINGLQPVPVSSNGLFCAIVLLFLMLLFVISSIASCKWRMNKILGFTMFLLYFVFLIISVMLEDRIISCPVSV

SEQ ID NO: 238 - protein, 410 aa, Homo sapiens
METRPTALMSSTVAAAAPAAGAASRKESPGRWGLGEDPTGVSPSLQCRVCGDSSSGKHYGIYACNGCSGFFKRSVRRRLIYRCQVGAGMCPVDKAHRNQCQACRLKKCLQAGMNQDAVQNERQPRSTAQVHLDSMESNTESRPESLVAPPAPAGRSPRGPTPMSAARALGHHFMASLITAETCAKLEPEDADENIDVTSNDPEFPSSPYSSSSPCGLDSIHETSARLLFMAVKWAKNLPVFSSLPFRDQVILLEEAWSELFLLGAIQWSLPLDSCPLLAPPEASAAGGAQGRLTLASMETRVLQETISRFRALAVDPTEFACMKALVLFKPETRGLKDPEHVEALQDQSQVMLSQHSKAHHPSQPVRFGKLLLLLPSLRFITAERIELLFFRKTIGNTPMEKLLCDMFKN

SEQ ID NO: 239 - protein, 519 aa, Homo sapiens
MAEERVATRTQFPVSTESQKPRQKKAPEFPILEKQNWLIHLHYIRKDYEACKAVIKEQLQETQGLCEYAIYVQALIFRLEGNIQESLELFQTCAVLSPQSADNLKQVARSLFLLGKHKAAIEVYNEAAKLNQKDWEISHNLGVCYIYLKQFNKAQDQLHNALNLNRHDLTYIMLGKIHLLEGDLDKAIEVYKKAVEFSPENTELLTTLGLLYLQLGIYQKAFEHLGNALTYDPTNYKAILAAGSMMQTHGDFDVALTKYRVVACAVPESPPLWNNIGMCFFGKKKYVAAISCLKRANYLAPFDWKILYNLGLVHLTMQQYASAFHFLSAAINFQPKMGELYMLLAVALTNLEDIENAKRAYAEAVHLDKCNPLVNLNYAVLLYNQGEKKNALAQYQEMEKKVSLLKDNSSLEFDSEMVEMAQKLGAALQVGEALVWTKPVKDPKSKHQTTSTSKPASFQQPLGSNQALGQAMSSAAAYRTLPSGAGGTSQFTKPPSLPLEPEPAVESSPTETSEQIREK

SEQ ID NO: 240 - protein, 187 aa, Homo sapiens
MGNKQTIFTEEQLDNYQDCTFFNKKDILKLHSRFYELAPNLVPMDYRKSPIVHVPMSLIIQMPELRENPFKERIVAAFSEDGEGNLTFNDFVDMFSVLCESAPRELKANYAFKIYDFNTDNFICKEDLELTLARLTKSELDEEEVVLVCDKVIEEADLDGDGKLGFADFEDMIAKAPDFLSTFHIRI

SEQ ID NO: 241 - protein, 317 aa, Homo sapiens
MSEGVGTFRMVPEEEQELRAQLEQLTTKDHGPVFGPCSQLPRHTLQKAKDELNEREETREEAVRELQEMVQAQAASGEELAVAVAERVQEKDSGFFLRFIRARKFNVGRAYELLRGYVNFRLQYPELFDSLSPEAVRCTIEAGYPGVLSSRDKYGRVVMLFNIENWQSQEITFDEILQAYCFILEKLLENEETQINGFCIIENFKGFTMQQAASLRTSDLRKMVDMLQDSFPARFKAIHFIHQPWYFTTTYNVVKPFLKSKLLERVFVHGDDLSGFYQEIDENILPSDFGGTLPKYDGKAVAEQLFGPQAQAENTAF

SEQ ID NO: 242 - protein, 305 aa, Homo sapiens
MAAGLARLLLLLGLSAGGPAPAGAAKMKVVEEPNAFGVNNPFLPQASRLQAKRDPSPVSGPVHLFRLSGKCFSLVESTYKYEFCPFHNVTQHEQTFRWNAYSGILGIWHEWEIANNTFTGMWMRDGDACRSRSRQSKVELACGKSNRLAHVSEPSTCVYALTFETPLVCHPHALLVYPTLPEALQRQWDQVEQDLADELITPQGHEKLLRTLFEDAGYLKTPEENEPTQLEGGPDSLGFETLENCRKAHKELSKEIKRLKGLLTQHGIPYTRPTETSNLEHLGHETPRAKSPEQLRGDPGLRGSL

SEQ ID NO: 243 - protein, 1462 aa, Homo sapiens
MALYYDHQIEAPDAAGSPSFISWHPVHPFLAVAYISTTSTGSVDIYLEQGECVPDTHVERPFRVASLCWHPTRLVLAVGWETGEVTVFNKQDKEQHTMPLTHTADITVLRWSPSGNCLLSGDRLGVLLLWRLDQRGRVQGTPLLKHEYGKHLTHCIFRLPPPGEDLVQLAKAAVSGDEKALDMFNWKKSSSGSLLKMGSHEGLLFFVSLMDGTVHYVDEKGKTTQVVSADSTIQMLFYMEKREALVVVTENLRLSLYTVPPEGKAEEVMKVKLSGKTGRRADIALIEGSLLVMAVGEAALRFWDIERGENYILSPDEKFGFEKGENMNCVCYCKVKGLLAAGTDRGRVAMWRKVPDFLGSPGAEGKDRWALQTPTELQGNITQIQWGSRKNLLAVNSVISVAILSERAMSSHFHQQVAAMQVSPSLLNVCFLSTGVAHSLRTDMHISGVFATKDAVAVWNGRQVAIFELSGAAIRSAGTFLCETPVLAMHEENVYTVESNRVQVRTWQGTVKQLLLFSETEGNPCFLDICGNFLVVGTDLAHFKSFDLSRREAKAHCSCRSLAELVPGVGGIASLRCSSSGSTISILPSKADNSPDSKICFYDVEMDTVTVFDFKTGQIDRRETLSFNEQETNKSHLFVDEGLKNYVPVNHFWDQSEPRLFVCEAVQETPRSQPQSANGQPQDGRAGPAADVLILSFFISEEHGFLLHESFPRPATSHSLLGMEVPYYYFTRKPEEADREDEVEPGCHHIPQMVSRRPLRDFVGLEDCDKATRDAMLHFSFFVTIGDMDEAFKSIKLIKSEAVWENMARMCVKTQRLDVAKVCLGNMGHARGARALREAEQEPELEARVAVLATQLGMLEDAEQLYRKCKRHDLLNKFYQAAGRWQEALQVAEHHDRVHLRSTYHRYAGHLEASADCSRALSYYEKSDTHRFEVPRMLSEDLPSLELYVNKMKDKTLWRWWAQYLESQGEMDAALHYYELARDHFSLVRIHCFQGNVQKAAQIANETGNLAASYHLARQYESQEEVGQAVHFYTRAQAFKNAIRLCKENGLDDQLMNLALLSSPEDMIEAARYYEEKGVQMDRAVMLYHKAGHFSKALELAFATQQFVALQLIAEDLDETSDPALLARCSDFFIEHSQYERAVELLLAARKYQEALQLCLGQNMSITEEMAEKMTVAKDSSDLPEESRRELLEQIADCCMRQGSYHLATKKYTQAGNKLKAMRALLKSGDTEKITFFASVSRQKEIYIMAANYLQSLDWRKEPEIMKNIIGFYTKGRALDLLAGFYDACAQVEIDEYQNYDKAHGALTEAYKCLAKAKAKSPLDQETRLAQLQSRMALVKRFIQARRTYTEDPKESIKQCELLLEEPDLDSTIRIGDVYGFLVEHYVRKEEYQTAYRFLEEMRRRLPLANMSYYVSPQAVDAVHRGLGLPLPRTVPEQVRHNSMEDARELDEEVVEEADDDP

SEQ ID NO: 244 - protein, 413 aa, Homo sapiens
MSFRDLRNFTEMMRALGYPRHISMENFRTPNFGLVSEVLLWLVKRYEPQTDIPPDVDTEQDRVFFIKAIAQFMATKAHIKLNTKKLYQADGYAVKELLKITSVLYNAMKTKGMEGSEIVEEDVNKFKFDLGSKIADLKAARQLASEITSKGASLYDLLGMEVELREMRTEAIARPLEINETEKVMRIAIKEILTQVQKTKDLLNNVASDEANLEAKIEKRKLELERNRKRLETLQSVRPCFMDEYEKTEEELQKQYDTYLEKFQNLTYLEQQLEDHHRMEQERFEEAKNTLCLIQNKLKEEEKRLLKSGSNDDSDIDIQEDDESDSELEERRLPKPQTAMEMLMQGRPGKRIVGTMQGGDSDDNEDSEESEIDMEDDDDEDDDLEDESISLSPTKPNRRVRKSEPLDESDNDF

SEQ ID NO: 245 - protein, 1503 aa, Homo sapiens
MAAPAEPCAGQGVWNQTEPEPAATSLLSLCFLRTAGVWVPPMYLWVLGPIYLLFIHHHGRGYLRMSPLFKAKMVLGFALIVLCTSSVAVALWKIQQGTPEAPEFLIHPTVWLTTMSFAVFLIHTERKKGVQSSGVLFGYWLLCFVLPATNAAQQASGAGFQSDPVRHLSTYLCLSLVVAQFVLSCLADQPPFFPEDPQQSNPCPETGAAFPSKATFWWVSGLVWRGYRRPLRPKDLWSLGRENSSEELVSRLEKEWMRNRSAARRHNKAIAFKRKGGSGMKAPETEPFLRQEGSQWRPLLKAIWQVFHSTFLLGTLSLIISDVFRFTVPKLLSLFLEFIGDPKPPAWKGYLLAVLMFLSACLQTLFEQQNMYRLKVLQMRLRSAITGLVYRKVLALSSGSRKASAVGDVVNLVSVDVQRLTESVLYLNGLWLPLVWIVVCFVYLWQLLGPSALTAIAVFLSLLPLNFFISKKRNHHQEEQMRQKDSRARLTSSILRNSKTIKFHGWEGAFLDRVLGIRGQELGALRTSGLLFSVSLVSFQVSTFLVALVVFAVHTLVAENAMNAEKAFVTLTVLNILNKAQAFLPFSIHSLVQARVSFDRLVTFLCLEEVDPGVVDSSSSGSAAGKDCITIHSATFAWSQESPPCLHRINLTVPQGCLLAVVGPVGAGKSSLLSALLGELSKVEGFVSIEGAVAYVPQEAWVQNTSVVENVCFGQELDPPWLERVLEACALQPDVDSFPEGIHTSIGEQGMNLSGGQKQRLSLARAVYRKAAVYLLDDPLAALDAHVGQHVFNQVIGPGGLLQGTTRILVTHALHILPQADWIIVLANGAIAEMGSYQELLQRKGALMCLLDQARQPGDRGEGETEPGTSTKDPRGTSAGRRPELRRERSIKSVPEKDRTTSEAQTEVPLDDPDRAGWPAGKDSIQYGRVKATVHLAYLRAVGTPLCLYALFLFLCQQVASFCRGYWLSLWADDPAVGGQQTQAALRGGIFGLLGCLQAIGLFASMAAVLLGGARASRLLFQRLLWDVVRSPISFFERTPIGHLLNRFSKETDTVDVDIPDKLRSLLMYAFGLLEVSLVVAVATPLATVAILPLFLLYAGFQSLYVVSSCQLRRLESASYSSVCSHMAETFQGSTVVRAFRTQAPFVAQNNARVDESQRISFPRLVADRWLAANVELLGNGLVFAAATCAVLSKAHLSAGLVGFSVSAALQVTQTLQWVVRNWTDLENSIVSVERMQDYAWTPKEAPWRLPTCAAQPPWPQGGQIEFRDFGLRYRPELPLAVQGVSFKIHAGEKVGIVGRTGAGKSSLASGLLRLQEAAEGGIWIDGVPIAHVGLHTLRSRISIIPQDPILFPGSLRMNLDLLQEHSDEAIWAALETVQLKALVASLPGQLQYKCADRGEDLSVGQKQLLCLARALLRKTQILILDEATAAVDPGTELQMQAMLGSWFAQCTVLLIAHRLRSVMDCARVLVMDKGQVAESGSPAQLLAQKGLFYRLAQESGLV

SEQ ID NO: 246 - protein, 314 aa, Homo sapiens
MSRVPAFLSAAEVEEHLRSSSLLIPPLETALANFSSGPEGGVMQPVRTVVPVTKHRGYLGVMPAYSAAEDALTTKLVTFYEDRGITSVVPSHQATVLLFEPSNGTLLAVMDGNVITAKRTAAVSAIATKFLKPPSSEVLCILGAGVQAYSHYEIFTEQFSFKEVRIWNRTKENAEKFADTVQGEVRVCSSVQEAVAGADVIITVTLATEPILFGEWVKPGAHINAVGASRPDWRELDDELMKEAVLYVDSQEAALKESGDVLLSGAEIFAELGEVIKGVKPAHCEKTTVFKSLGMAVEDTVAAKLIYDSWSSGK

SEQ ID NO: 247 - protein, 438 aa, Homo sapiens
MGGCAGSRRRFSDSEGEETVPEPRLPLLDHQGAHWKNAVGFWLLGLCNNFSYVVMLSAAHDILSHKRTSGNQSHVDPGPTPIPHNSSSRFDCNSVSTAAVLLADILPTLVIKLLAPLGLHLLPYSPRVLVSGICAAGSFVLVAFSHSVGTSLCGVVFASISSGLGEVTFLSLTAFYPRAVISWWSSGTGGAGLLGALSYLGLTQAGLSPQQTLLSMLGIPALLLASYFLLLTSPEAQDPGGEEEAESAARQPLIRTEAPESKPGSSSSLSLRERWTVFKGLLWYIVPLVVVYFAEYFINQGLFELLFFWNTSLSHAQQYRWYQMLYQAGVFASRSSLRCCRIRFTWALALLQCLNLVFLLADVWFGFLPSIYLVFLIILYEGLLGGAAYVNTFHNIALETSDEHREFAMAATCISDTLGISLSGLLALPLHDFLCQLS

SEQ ID NO: 248 - protein, 1284 aa, Homo sapiens
MHKKRVEEGEASDFSLAWDSSVTAAGGLEGEPECDQKTSRALEDRNSVTSQEERNEDDEDMEDESIYTCDHCQQDFESLADLTDHRAHRCPGDGDDDPQLSWVASSPSSKDVASPTQMIGDGCDLGLGEEEGGTGLPYPCQFCDKSFIRLSYLKRHEQIHSDKLPFKCTYCSRLFKHKRSRDRHIKLHTGDKKYHCHECEAAFSRSDHLKIHLKTHSSSKPFKCTVCKRGFSSTSSLQSHMQAHKKNKEHLAKSEKEAKKDDFMCDYCEDTFSQTEELEKHVLTRHPQLSEKADLQCIHCPEVFVDENTLLAHIHQAHANQKHKCPMCPEQFSSVEGVYCHLDSHRQPDSSNHSVSPDPVLGSVASMSSATPDSSASVERGSTPDSTLKPLRGQKKMRDDGQGWTKVVYSCPYCSKRDFNSLAVLEIHLKTIHADKPQQSHTCQICLDSMPTLYNLNEHVRKLHKNHAYPVMQFGNISAFHCNYCPEMFADINSLQEHIRVSHCGPNANPSDGNNAFFCNQCSMGFLTESSLTEHIQQAHCSVGSAKLESPVVQPTQSFMEVYSCPYCTNSPIFGSILKLTKHIKENHKNIPLAHSKKSKAEQSPVSSDVEVSSPKRQRLSASANSISNGEYPCNQCDLKFSNFESFQTHLKLHLELLLRKQACPQCKEDFDSQESLLQHLTVHYMTTSTHYVCESCDKQFSSVDDLQKHLLDMHTFVLYHCTLCQEVFDSKVSIQVHLAVKHSNEKKMYRCTACNWDFRKEADLQVHVKHSHLGNPAKAHKCIFCGETFSTEVELQCHITTHSKKYNCKFCSKAFHAIILLEKHLREKHCVFDAATENGTANGVPPMATKKAEPADLQGMLLKNPEAPNSHEASEDDVDASEPMYGCDICGAAYTMEVLLQNHRLRDHNIRPGEDDGSRKKAEFIKGSHKCNVCSRTFFSENGLREHLQTHRGPAKHYMCPICGERFPSLLTLTEHKVTHSKSLDTGTCRICKMPLQSEEEFIEHCQMHPDLRNSLTGFRCVVCMQTVTSTLELKIHGTFHMQKLAGSSAASSPNGQGLQKLYKCALCLKEFRSKQDLVKLDVNGLPYGLCAGCMARSANGQVGGLAPPEPADRPCAGLRCPECSVKFESAEDLESHMQVDHRDLTPETSGPRKGTQTSPVPRKKTYQCIKCQMTFENEREIQIHVANHMIEEGINHECKLCNQMFDSPAKLLCHLIEHSFEGMGGTFKCPVCFTVFVQANKLQQHIFAVHGQEDKIYDCSQCPQKFFFQTELQNHTMSQHAQ

SEQ ID NO: 249 - protein, 1315 aa, Homo sapiens
MSGPTDETAGDLPVKDTGLNLFGMGGLQETSTTRTMKSRQAVSRVSREELEDRFLRLHDENILLKQHARKQEDKIKRMATKLIRLVNDKKRYERVGGGPKRLGRDVEMEEMIEQLQEKVHELEKQNETLKNRLISAKQQLQTQGYRQTPYNNVQSRINTGRRKANENAGLQECPRKGIKFQDADVAETPHPMFTKYGNSLLEEARGEIRNLENVIQSQRGQIEELEHLAEILKTQLRRKENEIELSLLQLREQQATDQRSNIRDNVEMIKLHKQLVEKSNALSAMEGKFIQLQEKQRTLRISHDALMANGDELNMQLKEQRLKCCSLEKQLHSMKFSERRIEELQDRINDLEKERELLKENYDKLYDSAFSAAHEEQWKLKEQQLKVQIAQLETALKSDLTDKTEILDRLKTERDQNEKLVQENRELQLQYLEQKQQLDELKKRIKLYNQENDINADELSEALLLIKAQKEQKNGDLSFLVKVDSEINKDLERSMRELQATHAETVQELEKTRNMLIMQHKINKDYQMEVEAVTRKMENLQQDYELKVEQYVHLLDIRAARIHKLEAQLKDIAYGTKQYKFKPEIMPDDSVDEFDETIHLERGENLFEIHINKVTFSSEVLQASGDKEPVTFCTYAFYDFELQTTPVVRGLHPEYNFTSQYLVHVNDLFLQYIQKNTITLEVHQAYSTEYETIAACQLKFHEILEKSGRIFCTASLIGTKGDIPNFGTVEYWFRLRVPMDQAIRLYRERAKALGYITSNFKGPEHMQSLSQQAPKTAQLSSTDSTDGNLNELHITIRCCNHLQSRASHLQPHPYVVYKFFDFADHDTAIIPSSNDPQFDDHMYFPVPMNMDLDRYLKSESLSFYVFDDSDTQENIYIGKVNVPLISLAHDRCISGIFELTDHQKHPAGTIHVILKWKFAYLPPSGSITTEDLGNFIRSEEPEVVQRLPPASSVSTLVLAPRPKPRQRLTPVDKKVSFVDIMPHQSDETSPPPEDRKEISPEVEHIPEIEINMLTVPHVPKVSQEGSVDEVKENTEKMQQGKDDVSLLSEGQLAEQSLASSEDETEITEDLEPEVEEDMSASDSDDCIIPGPISKNIKQSLALSPGLGCSSAISAHCNFRLPGSSDFPASASQVDGITGACHHTQPSEKIRIEIIALSLNDSQVTMDDTIQRLFVECRFYSLPAEETPVSLPKPKSGQWVYYNYSNVIYVDKENNKAKRDILKAILQKQEMPNRSLRFTVVSDPPEDEQDLECEDIGVAHVDLADMFQEGRDLIEQNIDVFDARADGEGIGKLRVTVEALHALQSVYKQYRDDLEA

SEQ ID NO: 250 - protein, 721 aa, Homo sapiens
MLLPVFTLKLRHKISPRMVAIGRYDGTHPCLAAATQTGKVFIHNPHTRNQHVSASRVFQSPLESDVSLLSINQAVSCLTAGVLNPELGYDALLVGTQTNLLAYDVYNNSDLFYREVADGANAIVLGTLGDISSPLAIIGGNCALQGFNHEGSDLFWTVTGDNVNSLALCDFDGDGKKELLVGSEDFDIRVFKEDEIVAEMTETEIVTSLCPMYGSRFGYALSNGTVGVYDKTSRYWRIKSKNHAMSIHAFDLNSDGVNELITGWSNGKVDARSDRTGEVIFKDNFSSAIAGVVEGDYRMDGHIQLICCSVDGEIRGYLPGTAEMRGNLMDTSAEQDLIRELSQKKQNLLLELRNYEENAKAELASPLNEADGHRGIIPANTRLHTTLSVSLGNETQTAHTELRISTSNDTIIRAVLIFAEGIFTGESHVVHPSIHNLSSSICIPIVPPKDVPVDLHLKAFVGYRSSTQFHVFESTRQLPRFSMYALTSLDPASEPISYVNFTIAERAQRVVVWLGQNFLLPEDTHIQNAPFQVCFTSLRNGGHLHIKIKLSGEITINTDDIDLAGDIIQSMASFFAIEDLQVEADFPVYFEELRKVLVKVDEYHSVHQKLSADMADHSNLIRSLLVGAEDARLMRDMKTMKSRYMELYDLNRDLLNGYKIRCNNHTELLGNLKAVNQAIQRAGRLRVGKPKNQVITACRDAIRSNNINTLFKIMRVGTASS

SEQ ID NO: 251 - protein, 163 aa, Homo sapiens
MDALEGESFALSFSSASDAEFDAVVGYLEDIIMDDEFQLLQRNFMDKYYLEFEDTEENKLIYTPIFNEYISLVEKYIEEQLLQRIPEFNMAAFTTTLQHHKDEVAGDIFDMLLTFTDFLAFKEMFLDYRAEKEGRGLDLSSGLVVTSLCKSSSLPASQNNLRH

SEQ ID NO: 252 - protein, 1251 aa, Homo sapiens
MLGWVQRVLPQPPGTPRKTKMQEEEEVEPEPEMEAEVEPEPNPEEAETESESMPPEESFKEEEVAVADPSPQETKEAALTSTISLRAQGAEISEMNSPSRRVLTWLMKGVEKVIPQPVHSITEDPAQILGHGSTGDTGCTDEPNEALEAQDTRPGLRLLLWLEQNLERVLPQPPKSSEVWRDEPAVATGAASDPAPPGRPQEMGPKLQARETPSLPTPIPLQPKEEPKEAPAPEPQPGSQAQTSSLPPTRDPARLVAWVLHRLEMALPQPVLHGKIGEQEPDSPGICDVQTISILPGGQVEPDLVLEEVEPPWEDAHQDVSTSPQGTEVVPAYEEENKAVEKMPRELSRIEEEKEDEEEEEEEEEEEEEEEVTEVLLDSCVVSQVGVGQSEEDGTRPQSTSDQKLWEEVGEEAKKEAEEKAKEEAEEVAEEEAEKEPQDWAETKEEPEAEAEAASSGVPATKQHPEVQVEDTDADSCPLMAEENPPSTVLPPPSPAKSDTLIVPSSASGTHRKKLPSEDDEAEELKALSPAESPVVAWSDPTTPKDTDGQDRAASTASTNSAIINDRLQELVKLFKERTEKVKEKLIDPDVTSDEESPKPSPAKKAPEPAPDTKPAEAEPVEEEHYCDMLCCKFKHRPWKKYQFPQSIDPLTNLMYVLWLFFVVMAWNWNCWLIPVRWAFPYQTPDNIHHWLLMDYLCDLIYFLDITVFQTRLQFVRGGDIITDKKDMRNNYLKSRRFKMDLLSLLPLDFLYLKVGVNPLLRLPRCLKYMAFFEFNSRLESILSKAYVYRVIRTTAYLLYSLHLNSCLYYWASAYQGLGSTHWVYDGVGNSYIRCYYFAVKTLITIGGLPDPKTLFEIVFQLLNYFTGVFAFSVMIGQMRDVVGAATAGQTYYRSCMDSTVKYMNFYKIPKSVQNRVKTWYEYTWHSQGMLDESELMVQLPDKMRLDLAIDVNYNIVSKVALFQGCDRQMIFDMLKRLRSVVYLPNDYVCKKGEIGREMYIIQAGQVQVLGGPDGKSVLVTLKAGSVFGEISLLAVGGGNRRTANVVAHGFTNLFILDKKDLNEILVHYPESQKLLRKKARRMLRSNNKPKEEKSVLILPPRAGTPKLFNAALAMTGKMGGKGAKGGKLAHLRARLKELAALEAAAKQQELVEQAKSSQDVKGEEGSAAPDQHTHPKEAATDPPAPRTPPEPPGSPPSSPPPASLGRPEGEEEGPAEPEEHSVRICMSPGPEPGEQILSVKMPEEREEKAE

SEQ ID NO: 253 - protein, 829 aa, Homo sapiens
MGLPRGPLASLLLLQVCWLQCAASEPCRAVFREAEVTLEAGGAEQEPGQALGKVFMGCPGQEPALFSTDNDDFTVRNGETVQERRSLKERNPLKIFPSKRILRRHKRDWVVAPISVPENGKGPFPQRLNQLKSNKDRDTKIFYSITGPGADSPPEGVFAVEKETGWLLLNKPLDREEIAKYELFGHAVSENGASVEDPMNISIIVTDQNDHKPKFTQDTFRGSVLEGVLPGTSVMQVTATDEDDAIYTYNGVVAYSIHSQEPKDPHDLMFTIHRSTGTISVISSGLDREKVPEYTLTIQATDMDGDGSTTTAVAVVEILDANDNAPMFDPQKYEAHVPENAVGHEVQRLTVTDLDAPNSPAWRATYLIMGGDDGDHFTITTHPESNQGILTTRKGLDFEAKNQHTLYVEVTNEAPFVLKLPTSTATIVVHVEDVNEAPVFVPPSKVVEVQEGIPTGEPVCVYTAEDPDKENQKISYRILRDPAGWLAMDPDSGQVTAVGTLDREDEQFVRNNIYEVMVLAMDNGSPPTTGTGTLLLTLIDVNDHGPVPEPRQITICNQSPVRQVLNITDKDLSPHTSPFQAQLTDDSDIYWTAEVNEEGDTVVLSLKKFLKQDTYDVHLSLSDHGNKEQLTVIRATVCDCHGHVETCPGPWKGGFILPVLGAVLALLFLLLVLLLLVRKKRKIKEPLLLPEDDTRDNVFYYGEEGGGEEDQDYDITQLHRGLEARPEVVLRNDVAPTIIPTPMYRPRPANPDEIGNFIIENLKAANTDPTAPPYDTLLVFDYEGSGSDAASLSSLTSSASDQDQDYDYLNEWGSRFKKLADMYGGGEDD

SEQ ID NO: 254 - protein, 1227 aa, Homo sapiens
MGDTSEDASIHRLEGTDLDCQVGGLICKSKSAASEQHVFKAPAPRPSLLGLDLLASLKRREREEKDDGEDKKKSKVSSYKDWEESKDDQKDAEEEGGDQAGQNIRKDRHYRSARVETPSHPGGVSEEFWERSRQRERERREHGVYASSKEEKDWKKEKSRDRDYDRKRDRDERDRSRHSSRSERDGGSERSSRRNEPESPRHRPKDAATPSRSTWEEEDSGYGSSRRSQWESPSPTPSYRDSERSHRLSTRDRDRSVRGKYSDDTPLPTPSYKYNEWADDRRHLGSTPRLSRGRGRREEGEEGISFDTEEERQQWEDDQRQADRDWYMMDEGYDEFHNPLAYSSEDYVRRREQHLHKQKQKRISAQRRQINEDNERWETNRMLTSGVVHRLEVDEDFEEDNAAKVHLMVHNLVPPFLDGRIVFTKQPEPVIPVKDATSDLAIIARKGSQTVRKHREQKERKKAQHKHWELAGTKLGDIMGVKKEEEPDKAVTEDGKVDYRTEQKFADHMKRKSEASSEFAKKKSILEQRQYLPIFAVQQELLTIIRDNSIVIVVGETGSGKTTQLTQYLHEDGYTDYGMIGCTQPRRVAAMSVAKRVSEEMGGNLGEEVGYAIRFEDCTSENTLIKYMTDGILLRESLREADLDHYSAIIMDEAHERSLNTDVLFGLLREVVARRSDLKLIVTSATMDAEKFAAFFGNVPIFHIPGRTFPVDILFSKTPQEDYVEAAVKQSLQVHLSGAPGDILIFMPGQEDIEVTSDQIVEHLEELENAPALAVLPIYSQLPSDLQAKIFQKAPDGVRKCIVATNIAETSLTVDGIMFVIDSGYCKLKVFNPRIGMDALQIYPISQANANQRSGRAGRTGPGQCFRLYTQSAYKNELLTTTVPEIQRTNLANVVLLLKSLGVQDLLQFHFMDPPPEDNMLNSMYQLWILGALDNTGGLTSTGRLMVEFPLDPALSKMLIVSCDMGCSSEILLIVSMLSVPAIFYRPKGREEESDQIREKFAVPESDHLTYLNVYLQWKNNNYSTIWCNDHFIHAKAMRKVREVRAQLKDIMVQQRMSLASCGTDWDIVRKCICAAYFHQAAKLKGIGEYVNIRTGMPCHLHPTSSLFGMGYTPDYIVYHELVMTTKEYMQCVTAVDGEWLAELGPMFYSVKQAGKSRQENRRRAKEEASAMEEEMALAEEQLRARRQEQEKRSPLGSVRSTKIYTPGRKEQGEPMTPRRTPARFGL

SEQ ID NO: 255 - protein, 1221 aa, Homo sapiens
MECALLLACAFPAAGSGPPRGLAGLGRVAKALQLCCLCCASVAAALASDSSSGASGLNDDYVFVTPVEVDSAGSYISHDILHNGRKKRSAQNARSSLHYRFSAFGQELHLELKPSAILSSHFIVQVLGKDGASETQKPEVQQCFYQGFIRNDSSSSVAVSTCAGLSGLIRTRKNEFLISPLPQLLAQEHNYSSPAGHHPHVLYKRTAEEKIQRYRGYPGSGRNYPGYSPSHIPHASQSRETEYHHRRLQKQHFCGRRKKYAPKPPTEDTYLRFDEYGSSGRPRRSAGKSQKGLNVETLVVADKKMVEKHGKGNVTTYILTVMNMVSGLFKDGTIGSDINVVVVSLILLEQEPGGLLINHHADQSLNSFCQWQSALIGKNGKRHDHAILLTGFDICSWKNEPCDTLGFAPISGMCSKYRSCTINEDTGLGLAFTIAHESGHNFGMIHDGEGNPCRKAEGNIMSPTLTGNNGVFSWSSCSRQYLKKFLSTPQAGCLVDEPKQAGQYKYPDKLPGQIYDADTQCKWQFGAKAKLCSLGFVKDICKSLWCHRVGHRCETKFMPAAEGTVCGLSMWCRQGQCVKFGELGPRPIHGQWSAWSKWSECSRTCGGGVKFQERHCNNPKPQYGGLFCPGSSRIYQLCNINPCNENSLDFRAQQCAEYNSKPFRGWFYQWKPYTKVEEEDRCKLYCKAENFEFFFAMSGKVKDGTPCSPNKNDVCIDGVCELVGCDHELGSKAVSDACGVCKGDNSTCKFYKGLYLNQHKANEYYPVVLIPAGARSIEIQELQVSSSYLAVRSLSQKYYLTGGWSIDWPGEFPFAGTTFEYQRSFNRPERLYAPGPTNETLVFEILMQGKNPGIAWKYALPKVMNGTPPATKRPAYTWSIVQSECSVSCGGGYINVKAICLRDQNTQVNSSFCSAKTKPVTEPKICNAFSCPAYWMPGEWSTCSKACAGGQQSRKIQCVQKKPFQKEEAVLHSLCPVSTPTQVQACNSHACPPQWSLGPWSQCSKTCGRGVRKRELLCKGSAAETLPESQCTSLPRPELQEGCVLGRCPKNSRLQWVASSWSECSATCGLGVRKREMKCSEKGFQGKLITFPERRCRNIKKPNLDLEETCNRRACPAHPVYNMVAGWYSLPWQQCTVTCGGGVQTRSVHCVQQGRPSSSCLLHQKPPVLRACNTNFCPAPEKREDPSCVDFFNWCHLVPQHGVCNHKFYGKQCCKSCTRKI

SEQ ID NO: 256 - protein, 435 aa, Homo sapiens
MEGQTPGSRGLPEKPHPATAAATLSSMGAVFILMKSALGAGLLNFPWAFSKAGGVVPAFLVELVSLVFLISGLVILGYAAAVSGQATYQGVVRGLCGPAIGKLCEACFLLNLLMISVAFLRVIGDQLEKLCDSLLSGTPPAPQPWYADQRFTLPLLSVLVILPLSAPREIAFQKYTSILGTLAACYLALVITVQYYLWPQGLVRESHPSLSPASWTSVFSVFPTICFGFQCHEAAVSIYCSMRKRSLSHWALVSVLSLLACCLIYSLTGVYGFLTFGTEVSADVLMSYPGNDMVIIVARVLFAVSIVTVYPIVLFLGRSVMQDFWRRSCLGGWGPSALADPSGLWVRMPLTILWVTVTLAMALFMPDLSEIVSIIGGISSFFIFIFPGLCLICAMGVEPIGPRVKCCLEVWGVVSVLVGTFIFGQSTAAAVWEMF

SEQ ID NO: 257 - protein, 1103 aa, Homo sapiens
MTACARRAGGLPDPGLCGPAWWAPSLPRLPRALPRLPLLLLLLLLQPPALSAVFTVGVLGPWACDPIFSRARPDLAARLAAARLNRDPGLAGGPRFEVALLPEPCRTPGSLGAVSSALARVSGLVGPVNPAACRPAELLAEEAGIALVPWGCPWTQAEGTTAPAVTPAADALYALLRAFGWARVALVTAPQDLWVEAGRSLSTALRARGLPVASVTSMEPLDLSGAREALRKVRDGPRVTAVIMVMHSVLLGGEEQRYLLEAAEELGLTDGSLVFLPFDTIHYALSPGPEALAALANSSQLRRAHDAVLTLTRHCPSEGSVLDSLRRAQERRELPSDLNLQQVSPLFGTIYDAVFLLARGVAEARAAAGGRWVSGAAVARHIRDAQVPGFCGDLGGDEEPPFVLLDTDAAGDRLFATYMLDPARGSFLSAGTRMHFPRGGSAPGPDPSCWFDPNNICGGGLEPGLVFLGFLLVVGMGLAGAFLAHYVRHRLLHMQMVSGPNKIILTVDDITFLHPHGGTSRKVAQGSRSSLGARSMSDIRSGPSQHLDSPNIGVYEGDRVWLKKFPGDQHIAIRPATKTAFSKLQELRHENVALYLGLFLARGAEGPAALWEGNLAVVSEHCTRGSLQDLLAQREIKLDWMFKSSLLLDLIKGIRYLHHRGVAHGRLKSRNCIVDGRFVLKITDHGHGRLLEAQKVLPEPPRAEDQLWTAPELLRDPALERRGTLAGDVFSLAIIMQEVVCRSAPYAMLELTPEEVVQRVRSPPPLCRPLVSMDQAPVECILLMKQCWAEQPELRPSMDHTFDLFKNINKGRKTNIIDSMLRMLEQYSSNLEDLIRERTEELELEKQKTDRLLTQMLPPSVAEALKTGTPVEPEYFEQVTLYFSDIVGFTTISAMSEPIEVVDLLNDLYTLFDAIIGSHDVYKVETIGDAYMVASGLPQRNGQRHAAEIANMSLDILSAVGTFRMRHMPEVPVRIRIGLHSGPCVAGVVGLTMPRYCLFGDTVNTASRMESTGLPYRIHVNLSTVGILRALDSGYQVELRGRTELKGKGAEDTFWLVGRRGFNKPIPKPPDLQPGSSNHGISLQEIPPERRRKLEKARPGQFS

SEQ ID NO: 258 - protein, 2335 aa, Homo sapiens
MAGVFPYRGPGNPVPGPLAPLPDYMSEEKLQEKARKWQQLQAKRYAEKRKFGFVDAQKEDMPPEHVRKIIRDHGDMTNRKFRHDKRVYLGALKYMPHAVLKLLENMPMPWEQIRDVPVLYHITGAISFVNEIPWVIEPVYISQWGSMWIMMRREKRDRRHFKRMRFPPFDDEEPPLDYADNILDVEPLEAIQLELDPEEDAPVLDWFYDHQPLRDSRKYVNGSTYQRWQFTLPMMSTLYRLANQLLTDLVDDNYFYLFDLKAFFTSKALNMAIPGGPKFEPLVRDINLQDEDWNEFNDINKIIIRQPIRTEYKIAFPYLYNNLPHHVHLTWYHTPNVVFIKTEDPDLPAFYFDPLINPISHRHSVKSQEPLPDDDEEFELPEFVEPFLKDTPLYTDNTANGIALLWAPRPFNLRSGRTRRALDIPLVKNWYREHCPAGQPVKVRVSYQKLLKYYVLNALKHRPPKAQKKRYLFRSFKATKFFQSTKLDWVEVGLQVCRQGYNMLNLLIHRKNLNYLHLDYNFNLKPVKTLTTKERKKSRFGNAFHLCREVLRLTKLVVDSHVQYRLGNVDAFQLADGLQYIFAHVGQLTGMYRYKYKLMRQIRMCKDLKHLIYYRFNTGPVGKGPGCGFWAAGWRVWLFFMRGITPLLERWLGNLLARQFEGRHSKGVAKTVTKQRVESHFDLELRAAVMHDILDMMPEGIKQNKARTILQHLSEAWRCWKANIPWKVPGLPTPIENMILRYVKAKADWWTNTAHYNRERIRRGATVDKTVCKKNLGRLTRLYLKAEQERQHNYLKDGPYITAEEAVAVYTTTVHWLESRRFSPIPFPPLSYKHDTKLLILALERLKEAYSVKSRLNQSQREELGLIEQAYDNPHEALSRIKRHLLTQRAFKEVGIEFMDLYSHLVPVYDVEPLEKITDAYLDQYLWYEADKRRLFPPWIKPADTEPPPLLVYKWCQGINNLQDVWETSEGECNVMLESRFEKMYEKIDLTLLNRLLRLIVDHNIADYMTAKNNVVINYKDMNHTNSYGIIRGLQFASFIVQYYGLVMDLLVLGLHRASEMAGPPQMPNDFLSFQDIATEAAHPIRLFCRYIDRIHIFFRFTADEARDLIQRYLTEHPDPNNENIVGYNNKKCWPRDARMRLMKHDVNLGRAVFWDIKNRLPRSVTTVQWENSFVSVYSKDNPNLLFNMCGFECRILPKCRTSYEEFTHKDGVWNLQNEVTKERTAQCFLRVDDESMQRFHNRVRQILMASGSTTFTKIVNKWNTALIGLMTYFREAVVNTQELLDLLVKCENKIQTRIKIGLNSKMPSRFPPVVFYTPKELGGLGMLSMGHVLIPQSDLRWSKQTDVGITHFRSGMSHEEDQLIPNLYRYIQPWESEFIDSQRVWAEYALKRQEAIAQNRRLTLEDLEDSWDRGIPRINTLFQKDRHTLAYDKGWRVRTDFKQYQVLKQNPFWWTHQRHDGKLWNLNNYRTDMIQALGGVEGILEHTLFKGTYFPTWEGLFWEKASGFEESMKWKKLTNAQRSGLNQIPNRRFTLWWSPTINRANVYVGFQVQLDLTGIFMHGKIPTLKISLIQIFRAHLWQKIHESIVMDLCQVFDQELDALEIETVQKETIHPRKSYKMNSSCADILLFASYKWNVSRPSLLADSKDVMDSTTTQKYWIDIQLRWGDYDSHDIERYARAKFLDYTTDNMSIYPSPTGVLIAIDLAYNLHSAYGNWFPGSKPLIQQAMAKIMKANPALYVLRERIRKGLQLYSSEPTEPYLSSQNYGELFSNQIIWFVDDTNVYRVTIHKTFEGNLTTKPINGAIFIFNPRTGQLFLKIIHTSVWAGQKRLGQLAKWKTAEEVAALIRSLPVEEQPKQIIVTRKGMLDPLEVHLLDFPNIVIKGSELQLPFQACLKVEKFGDLILKATEPQMVLFNLYDDWLKTISSYTAFSRLILILRALHVNNDRAKVILKPDKTTITEPHHIWPTLTDEEWIKVEVQLKDLILADYGKKNNVNVASLTQSEIRDIILGMEISAPSQQRQQIAEIEKQTKEQSQLTATQTRTVNKHGDEIITSTTSNYETQTFSSKTEWRVRAISAANLHLRTNHIYVSSDDIKETGYTYILPKNVLKKFICISDLRAQIAGYLYGVSPPDNPQVKEIRCIVMVPQWGTHQTVHLPGQLPQHEYLKEMEPLGWIHTQPNESPQLSPQDVTTHAKIMADNPSWDGEKTIIITCSFTPGSCTLTAYKLTPSGYEWGRQNTDKGNNPKGYLPSHYERVQMLLSDRFLGFFMVPAQSSWNYNFMGVRHDPNMKYELQLANPKEFYHEVHRPSHFLNFALLQEGEVYSADREDLYA

SEQ ID NO: 259 - protein, 384 aa, Homo sapiens
MDAALLLNVEGVKKTILHGGTGELPNFITGSRVIFHFRTMKCDEERTVIDDSRQVGQPMHIIIGNMFKLEVWEILLTSMRVHEVAEFWCDTIHTGVYPILSRSLRQMAQGKDPTEWHVHTCGLANMFAYHTLGYEDLDELQKEPQPLVFVIELLQVDAPSDYQRETWNLSNHEKMKAVPVLHGEGNRLFKLGRYEEASSKYQEAIICLRNLQTKEKPWEVQWLKLEKMINTLILNYCQCLLKKEEYYEVLEHTSDILRHHPGIVKAYYVRARAHAEVWNEAEAKADLQKVLELEPSMQKAVRRELRLLENRMAEKQEEERLRCRNMLSQGATQPPAEPPTEPPAQSSTEPPAEPPTAPSAELSAGPPAEPATEPPPSPGHSLQH

SEQ ID NO: 260 - protein, 974 aa, Homo sapiens
MAKAGRAGGPPPGGGAPWHLRNVLSDSVESSDDEFFDAREEMAEGKNAILIGMSQWNSNDLVEQIETMGKLDEHQGEGTAPCTSSILQEKQRELYRVSLRRQRFPAQGSIEIHEDSEEGCPQRSCKTHVLLLVLHGGNILDTGAGDPSCKAADIHTFSSVLEKVTRAHFPAALGHILIKFVPCPAICSEAFSLVSHLNPYSHDEGCLSSSQDHVPLAALPLLAISSPQYQDAVATVIERANQVYREFLKSSDGIGFSGQVCLIGDCVGGLLAFDAICYSAGPSGDSPASSSRKGSISSTQDTPVAVEEDCSLASSKRLSKSNIDISSGLEDEEPKRPLPRKQSDSSTYDCEAITQHHAFLSSIHSSVLKDESETPAAGGPQLPEVSLGRFDFDVSDFFLFGSPLGLVLAMRRTVLPGLDGFQVRPACSQVYSFFHCADPSASRLEPLLEPKFHLVPPVSVPRYQRFPLGDGQSLLLADALHTHSPLFLEGSSRDSPPLLDAPASPPQASRFQRPGRRMSEGSSHSESSESSDSMAPVGASRITAKWWGSKRIDYALYCPDVLTAFPTVALPHLFHASYWESTDVVAFILRQVMRYESVNIKESARLDPAALSPANPREKWLRKRTQVKLRNVTANHRANDVIAAEDGPQVLVGRFMYGPLDMVALTGEKVDILVMAEPSSGRWVHLDTEITNSSGRITYNVPRPRRLGVGVYPVKMVVRGDQTCAMSYLTVLPRGMECVVFSIDGSFAASVSIMGSDPKVRPGAVDVVRHWQDLGYMILYITGRPDMQKQRVVSWLSQHNFPQGMIFFSDGLVHDPLRQKAIFLRNLMQECFIKISAAYGSTKDISVYSVLGLPASQIFIVGRPTKKYQTQCQFLSEGYAAHLAALEASHRSRPKKNNSRMILRKGSFGLHAQPEFLRKRNHLRRTMSVQQPDPPAANPKPERAQSQPESDKDHERPLPALSWARGPPKFESVP

SEQ ID NO: 261 - protein, 240 aa, Homo sapiens
MKVKKGGGGAGTATESAPGPSGQSVAPIPQPPAESESGSESEPDAGPGPRPGPLQRKQPIGPEDVLGLQRITGDYLCSPEENIYKIDFVRFKIRDMDSGTVLFEIKKPPVSERLPINRRDLDPNAGRFVRYQFTPAFLRLRQVGATVEFTVGDKPVNNFRMIERHYFRNQLLKSFDFHFGFCIPSSKNTCEHIYDFPPLSEELISEMIRHPYETQSDSFYFVDDRLVMHNKADYSYSGTP

SEQ ID NO: 262 - protein, 2367 aa, Homo sapiens
MGTRGAVMPPPMWGLLGCCFVCAWALGGPRPIRSLPPLSSQVKPGSVPMQVPLEGAEAALAYLYSGDAQQLSQVNCSERYEARGAGAMPGLPPSLQGAAGTLAQAANFLNMLLQANDIRESSVEEDVEWYQALVRSVAEGDPRVYRALLTFNPPPGASHLQLALQATRTGEETILQDLSGNWVQEENPPGDLDTPALKKRVLTNDLGSLGSPKWPQADGYVGDTQQVRLSPPFLECQEGRLRPGWLITLSATFYGLKPDLSPEVRGQVQMDVDLQSVDINQCASGPGWYSNTHLCDLNSTQCVPLESQGFVLGRYLCRCRPGFYGASPSGGLEESDFQTTGQFGFPEGRSGRLLQCLPCPEGCTSCMDATPCLVEEAAVLRAAVLACQACCMLAIFLSMLVSYRCRRNKRIWASGVVLLETVLFGFLLLYFPVFILYFKPSVFRCIALRWVRLLGFAIVYGTIILKLYRVLQLFLSRTAQRSALLSSGRLLRRLGLLLLPVLGFLAVWTVGALERGIQHAPLVIRGHTPSGRHFYLCHHDRWDYIMVVAELLLLCWGSFLCYATRAVLSAFHEPRYMGIALHNELLLSAAFHTARFVLVPSLHPDWTLLLFFFHTHSTVTTTLALIFIPKFWKLGAPPREEMVDEVCEDELDLQHSGSYLGSSIASAWSEHSLDPGDIRDELKKLYAQLEVHKTKEMAANNPHLPKKRGSSCQGLGRSFMRYLAEFPEALARQHSRDSGSPGHGSLPGSSRRRLLSSSLQEPEGTPALHKSRSTYDQRREQDPPLLDSLLRRKLAKKASRTESRESVEGPPALGFRSASAHNLTVGERLPRARPASLQKSLSVASSREKALLMASQAYLEETYRQAKEREERKKAKAAMASLVRRPSARRLERPRGAPLSAPPSPAKSSSVDSSHTSGRLHEEARRRLPHPPIRHQVSTPILALSGGLGEPRMLSPTSTLAPALLPALAPTPAPALAPVPVSPQSPNLLTYICPWENAELPAKQENVPQEGPSGPERGHHSPAPARARLWRALSVAVEKSRAGENEMDAEDAHHQREANDVDEDRPKIFPKSHSLKAPVQQGSMRSLGLAIKALTRSRSTYREKESVEESPEGQNSGTAGESMGAPSRSPRLGRPKAVSKQAALIPSDDKESLQNQQNAHTSRMLQVCQREGSREQEDRGRRMTQGLGERKAERAGKTGLAMLRQVSRDKNIKQSKETPVGWQELPKAGLQSLGSADHRVAEVCPWEVTESETRQPDSGNKAEICPWETSEGAPESRALRQDPGDSQKKRGEARGKSEPIDVVPMMRKKPERLVREQEAVCPWESADRGGLSPGSAPQDPGRIRDKSEAGDSVEARKVEKPGWEAAGPEAHTPDITKAEPCPWEASEGGEDGKPAQEAVKDLPQEKQKTRKATFWKEQKPGGDLESLCPWESTDFRGPSAVSIQAPGSSECSGSLGSGIAEVCLWEAGDAPAIQKAEICPWELDDNVMGQEMLSLGTGRESLQEKEKASRKGSFGEMGEQTVKAVQKLSQQQESVCPRESTVPGHSSPCLDNSSSKAGSQFLCNGGSRATQVCPQEDLRPEAQEATPAKTEICPWEVNERTREEWTSAQVPRGGESQKDKEKMPGKSEIEDVTAWEKPEGQIQKQEAVGPWESVDPGSFSPQPRPQDTERPQTLLQMSGSVGSKAADICPLDVEENLTAGKAEICPWEVGAGAGEERALGAEAIRKSPNDTGKVSADLGPRERAVTAPEKPQKPTPEWEVACPWGSVGPGACSQHPGTLDADGPKAGFQELDHMGCRPGEVCPWEAQEAATSEKAKICPWEVSEGTTGKGLDQKAGSESAEQREKALEKGRLTSLGEDVSKGMAKLCQQQETICIWENKDLRESPAQAPKISDLPSSMSSEVAEGHSLEATEKGDLRQDPKTGSFPEHITQEKAPAADTEEFTTEDGEKTSHELQSVCPWETTAPADSVSHLDRQRPDQPKASSQRLVSTGGRAADVCPWDVPDAGVYKSDSSAKAETCPWEVTERIPVKGVSRQDGKGDSQEEKGRAPEKSEPKGVPVQKKPEMADFRQQEAVCPWESQDGKGLSPQPAPDASDRSRGSSEAAGSVETRVAEVCLWEVVEAPSAKKAEICPWEAGGGAAEEGEQERESQGQGEMFLQKAGPGGTEEHFSKAAAKPREQEAVCPGEGTGSGGLLPQSGALDPELKVSPKEAGSMGSRMAELCQWEITDPEGNKIKGTMADICPGEETGVPSEESGLLALTATRREFFPTAPEKPLCLLVHGPLDHFFPESKIPCPKVSRPASTFTLEGVRELQGPSGLEPRTSLAPEPSLQEAESQSSSLTEDSGQVAFEAQYEEFTPPTVYPWDWE

SEQ ID NO: 263 - protein, 559 aa, Homo sapiens
MAETVWSTDTGEAVYRSRDPVRNLRLRVHLQRITSSNFLHYQPAAELGKDLIDLATFRPQPTASGHRPEEDEEEEIVIGWQEKLFSQFEVDLYQNETACQSPLDYQYRQEILKLENSGGKKNRRIFTYTDSDRYTNLEEHCQRMTTAASEVPSFLVERMANVRRRRQDRRGMEGGILKSRIVTWEPSEEFVRNNHVINTPLQTMHIMADLGPYKKLGYKKYEHVLCTLKVDSNGVITVKPDFTGLKGPYRIETEGEKQELWKYTIDNVSPHAQPEEEERERRVFKDLYGRHKEYLSSLVGTDFEMTVPGALRLFVNGEVVSAQGYEYDNLYVHFFVELPTAHWSSPAFQQLSGVTQTCTTKSLAMDKVAHFSYPFTFEAFFLHEDESSDALPEWPVLYCEVLSLDFWQRYRVEGYGAVVLPATPGSHTLTVSTWRPVELGTVAELRRFFIGGSLELEDLSYVRIPGSFKGERLSRFGLRTETTGTVTFRLHCLQQSRAFMESSSLQKRMRSVLDRLEGFSQQSSIHNVLEAFRRARRRMQEARESLPQDLVSPSGTLVS

SEQ ID NO: 264 - protein, 312 aa, Homo sapiens
MRMLLALLALSAARPSASAESHWCYEVQAESSNYPCLVPVKWGGNCQKDRQSPINIVTTKAKVDKKLGRFFFSGYDKKQTWTVQNNGHSVMMLLENKASISGGGLPAPYQAKQLHLHWSDLPYKGSEHSLDGEHFAMEMHIVHEKEKGTSRNVKEAQDPEDEIAVLAFLVEAGTQVNEGFQPLVEALSNIPKPEMSTTMAESSLLDLLPKEEKLRHYFRYLGSLTTPTCDEKVVWTVFREPIQLHREQILAFSQKLYYDKEQTVSMKDNVRPLQQLGQRTVIKSGAPGRPLPWALPALLGPMLACLLAGFLR

SEQ ID NO: 265 - protein, 674 aa, Homo sapiens
MTIRHQGQQYRPRMAFLQKIEALVKDMQNPETGVRMQNQRVLVTSVPHAMTGSDVLQWIVQRLWISSLEAQNLGNFIVRYGYIYPLQDPKNLILKPDGSLYRFQTPYFWPTQQWPAEDTDYAIYLAKRNIKKKGILEEYEKENYNFLNQKMNYKWDFVIMQAKEQYRAGKERNKADRYALDCQEKAYWLVHRCPPGMDNVLDYGLDRVTNPNEVKVNQKQTVVAVKKEIMYYQQALMRSTVKSSVSLGGIVKYSEQFSSNDAIMSGCLPSNPWITDDTQFWDLNAKLVEIPTKMRVERWAFNFSELIRDPKGRQSFQYFLKKEFSGENLGFWEACEDLKYGDQSKVKEKAEEIYKLFLAPGARRWINIDGKTMDITVKGLKHPHRYVLDAAQTHIYMLMKKDSYARYLKSPIYKDMLAKAIEPQETTKKSSTLPFMRRHLRSSPSPVILRQLEEEAKAREAANTVDITQPGQHMAPSPHLTVYTGTCMPPSPSSPFSSSCRSPRKPFASPSRFIRRPSTTICPSPIRVALESSSGLEQKGECSGSMAPRGPSVTESSEASLDTSWPRSRPRAPPKARMALSFSRFLRRGCLASPVFARLSPKCPAVSHGRVQPLGDVGQQLPRLKSKRVANFFQIKMDVPTGSGTCLMDSEDAGTGESGDRATEKEVICPWESL

SEQ ID NO: 266 - protein, 525 aa, Homo sapiens
MGWLFLKVLLAGVSFSGFLYPLVDFCISGKTRGQKPNFVIILADDMGWGDLGANWAETKDTANLDKMASEGMRFVDFHAAASTCSPSRASLLTGRLGLRNGVTRNFAVTSVGGLPLNETTLAEVLQQAGYVTGIIGKWHLGHHGSYHPNFRGFDYYFGIPYSHDMGCTDTPGYNHPPCPACPQGDGPSRNLQRDCYTDVALPLYENLNIVEQPVNLSSLAQKYAEKATQFIQRASTSGRPFLLYVALAHMHVPLPVTQLPAAPRGRSLYGAGLWEMDSLVGQIKDKVDHTVKENTFLWFTGDNGPWAQKCELAGSVGPFTGFWQTRQGGSPAKQTTWEGGHRVPALAYWPGRVPVNVTSTALLSVLDIFPTVVALAQASLPQGRRFDGVDVSEVLFGRSQPGHRVLFHPNSGAAGEFGALQTVRLERYKAFYITGGARACDGSTGPELQHKFPLIFNLEDDTAEAVPLERGGAEYQAVLPEVRKVLADVLQDIANDNISSADYTQDPSVTPCCNPYQIACRCQAA

SEQ ID NO: 267 - protein, 461 aa, Homo sapiens
MNDQYHRAARDGYLELLKEATRKELNAPDEDGMTPTLWAAYHGNLESLRLIVSRGGDPDKCDIWGNTPLHLAASNGHLHCLSFLVSFGANIWCLDNDYHTPLDMAAMKGHMECVRYLDSIAAKQSSLNPKLVGKLKDKAFREAERRIRECAKLQRRHHERMERRYRRELAERSDTLSFSSLTSSTLSRRLQHLALGSHLPYSQATLHGTARGKTKMQKKLERRKQGGEGTFKVSEDGRKSARSLSGLQLGSDVMFVRQGTYANPKEWGRAPLRDMFLSDEDSVSRATLAAEPAHSEVSTDSGHDSLFTRPGLGTMVFRRNYLSSGLHGLGREDGGLDGVGAPRGRLQSSPSLDDDSLGSANSLQDRSCGEELPWDELDLGLDEDLEPETSPLETFLASLHMEDFAALLRQEKIDLEALMLCSDLDLRSISVPLGPRKKILGAVRRRRQAMERPPALEDTEL

SEQ ID NO: 268 - protein, 54 aa, Homo sapiens
MCTTLFLLSTLAMLWRRRFANRVQPEPSDVDGAARGSSLDADPQSSGREKEPLK

SEQ ID NO: 269 - protein, 492 aa, Homo sapiens
MPTNGLHQVLKIQFGLVNDTDRYLTAESFGFKVNASAPSLKRKQTWVLEPDPGQGTAVLLRSSHLGRYLSAEEDGRVACEAEQPGRDCRFLVLPQPDGRWVLRSEPHGRFFGGTEDQLSCFATAVSPAELWTVHLAIHPQAHLLSVSRRRYVHLCPREDEMAADGDKPWGVDALLTLIFRSRRYCLKSCDSRYLRSDGRLVWEPEPRACYTLEFKAGKLAFKDCDGHYLAPVGPAGTLKAGRNTRPGKDELFDLEESHPQVVLVAANHRYVSVRQGVNVSANQDDELDHETFLMQIDQETKKCTFYSSTGGYWTLVTHGGIHATATQVSANTMFEMEWRGRRVALKASNGRYVCMKKNGQLAAISDFVGKDEEFTLKLINRPILVLRGLDGFVCHHRGSNQLDTNRSVYDVFHLSFSDGAYRIRGRDGGFWYTGSHGSVCSDGERAEDFVFEFRERGRLAIRARSGKYLRGGASGLLRADADAPAGTALWEY

SEQ ID NO: 270 - protein, 87 aa, Homo sapiens
MNLEPPKAEFRSATRVAGGPVTPRKGPPKFKQRQTRQFKSKPPKKGVQGFGDDIPGMEGLGTDITVICPWEAFNHLELHELAQYGII

SEQ ID NO: 271 - protein, 3075 aa, Homo sapiens
MRGGVLLVLLLCVAAQCRQRGLFPAILNLASNAHISTNATCGEKGPEMFCKLVEHVPGRPVRNPQCRICDGNSANPRERHPISHAIDGTNNWWQSPSIQNGREYHWVTITLDLRQVFQVAYVIIKAANAPRPGNWILERSLDGTTFSPWQYYAVSDSECLSRYNITPRRGPPTYRADDEVICTSYYSRLVPLEHGEIHTSLINGRPSADDLSPKLLEFTSARYIRLRLQRIRTLNADLMTLSHREPKELDPIVTRRYYYSIKDISVGGMCICYGHASSCPWDETTKKLQCQCEHNTCGESCNRCCPGYHQQPWRPGTVSSGNTCEACNCHNKAKDCYYDESVAKQKKSLNTAGQFRGGGVCINCLQNTMGINCETCIDGYYRPHKVSPYEDEPCRPCNCDPVGSLSSVCIKDDLHSDLHNGKQPGQCPCKEGYTGEKCDRCQLGYKDYPTCVSCGCNPVGSASDEPCTGPCVCKENVEGKACDRCKPGFYNLKEKNPRGCSECFCFGVSDVCSSLSWPVGQVNSMSGWLVTDLISPRKIPSQQDALGGRHQVSINNTAVMQRLAPKYYWAAPEAYLGNKLTAFGGFLKYTVSYDIPVETVDSNLMSHADVIIKGNGLTLSTQAEGLSLQPYEEYLNVVRLVPENFQDFHSKRQIDRDQLMTVLANVTHLLIRANYNSAKMALYRLESVSLDIASSNAIDLVVAADVEHCECPQGYTGTSCESCLSGYYRVDGILFGGICQPCECHGHAAECNVHGVCIACAHNTTGVHCEQCLPGFYGEPSRGTPGDCQPCACPLTIASNNFSPTCHLNDGDEVVCDWCAPGYSGAWCERCADGYYGNPTVPGESCVPCDCSGNVDPSEAGHCDSVTGECLKCLGNTDGAHCERCADGFYGDAVTAKNCRACECHVKGSHSAVCHLETGLCDCKPNVTGQQCDQCLHGYYGLDSGHGCRPCNCSVAGSVSDGCTDEGQCHCVPGVAGKRCDRCAHGFYAYQDGSCTPCDCPHTQNTCDPETGECVCPPHTQGVKCEECEDGHWGYDAEVGCQACNCSLVGSTHHRCDVVTGHCQCKSKFGGRACDQCSLGYRDFPDCVPCDCDLRGTSGDACNLEQGLCGCVEETGACPCKENVFGPQCNECREGTFALRADNPLGCSPCFCSGLSHLCSELEDYVRTPVTLGSDQPLLRVVSQSNLRGTTEGVYYQAPDFLLDAATVRQHIRAEPFYWRLPQQFQGDQLMAYGGKLKYSVAFYSLDGVGTSNFEPQVLIKGGRIRKQVIYMDAPAPENGVRQEQEVAMRENFWKYFNSVSEKPVTREDFMSVLSDIEYILIKASYGQGLQQSRISDISMEVGRKAEKLHPEEEVASLLENCVCPPGTVGFSCQDCAPGYHRGKLPAGSDRGPRPLVAPCVPCSCNNHSDTCDPNTGKCLNCGDNTAGDHCDVCTSGYYGKVTGSASDCALCACPHSPPASFSPTCVLEGDHDFRCDACLLGYEGKHCERCSSSYYGNPQTPGGSCQKCDCNPHGSVHGDCDRTSGQCVCRLGASGLRCDECEPRHILMETDCVSCDDECVGVLLNDLDEIGDAVLSLNLTGIIPVPYGILSNLENTTKYLQESLLKENMQKDLGKIKLEGVAEETDNLQKKLTRMLASTQKVNRATERIFKESQDLAIAIERLQMSITEIMEKTTLNQTLDEDFLLPNSTLQNMQQNGTSLLEIMQIRDFTQLHQNATLELKAAEDLLSQIQENYQKPLEELEVLKEAASHVLSKHNNELKAAEALVREAEAKMQESNHLLLMVNANLREFSDKKLHVQEEQNLTSELIVQGRGLIDAAAAQTDAVQDALEHLEDHQDKLLLWSAKIRHHIDDLVMHMSQRNAVDLVYRAEDHAAEFQRLADVLYSGLENIRNVSLNATSAAYVHYNIQSLIEESEELARDAHRTVTETSLLSESLVSNGKAAVQRSSRFLKEGNNLSRKLPGIALELSELRNKTNRFQENAVEITRQTNESLLILRAIPKGIRDKGAKTKELATSASQSAVSTLRDVAGLSQELLNTSASLSRVNTTLRETHQLLQDSTMATLLAGRKVKDVEIQANLLFDRLKPLKMLEENLSRNLSEIKLLISQARKQAASIKVAVSADRDCIRAYQPQISSTNYNTLTLNVKTQEPDNLLFYLGSSTASDFLAVEMRRGRVAFLWDLGSGSTRLEFPDFPIDDNRWHSIHVARFGNIGSLSVKEMSSNQKSPTKTSKSPGTANVLDVNNSTLMFVGGLGGQIKKSPAVKVTHFKGCLGEAFLNGKSIGLWNYIEREGKCRGCFGSSQNEDPSFHFDGSGYSVVEKSLPATVTQIIMLFNTFSPNGLLLYLGSYGTKDFLSIELFRGRVKVMTDLGSGPITLLTDRRYNNGTWYKIAFQRNRKQGVLAVIDAYNTSNKETKQGETPGASSDLNRLDKDPIYVGGLPRSRVVRRGVTTKSFVGCIKNLEISRSTFDLLRNSYGVRKGCLLEPIRSVSFLKGGYIELPPKSLSPESEWLVTFATTNSSGIILAALGGDVEKRGDREEAHVPFFSVMLIGGNIEVHVNPGDGTGLRKALLHAPTGTCSDGQAHSISLVRNRRIITVQLDENNPVEMKLGTLVESRTINVSNLYVGGIPEGEGTSLLTMRRSFHGCIKNLIFNLELLDFNSAVGHEQVDLDTCWLSERPKLAPDAEDSKLLPEPRAFPEQCVVDAALEYVPGAHQFGLTQNSHFILPFNQSAVRKKLSVELSIRTFASSGLIYYMAHQNQADYAVLQLHGGRLHFMFDLGKGRTKVSHPALLSDGKWHTVKTDYVKRKGFITVDGRESPMVTVVGDGTMLDVEGLFYLGGLPSQYQARKIGNITHSIPACIGDVTVNSKQLDKDSPVSAFTVNRCYAVAQEGTYFDGSGYAALVKEGYKVQSDVNITLEFRTSSQNGVLLGISTAKVDAIGLELVDGKVLFHVNNGAGRITAAYEPKTATVLCDGKWHTLQANKSKHRITLIVDGNAVGAESPHTQSTSVDTNNPIYVGGYPAGVKQKCLRSQTSFRGCLRKLALIKSPQVQSFDFSRAFELHGVFLHSCPGTES

SEQ ID NO: 272 - protein, 797 aa, Homo sapiens
MAHRCLRLWGRGGCWPRGLQQLLVPGGVGPGEQPCLRTLYRFVTTQARASRNSLLTDIIAAYQRFCSRPPKGFEKYFPNGKNGKKASEPKEVMGEKKESKPAATTRSSGGGGGGGGKRGGKKDDSHWWSRFQKGDIPWDDKDFRMFFLWTALFWGGVMFYLLLKRSGREITWKDFVNNYLSKGVVDRLEVVNKRFVRVTFTPGKTPVDGQYVWFNIGSVDTFERNLETLQQELGIEGENRVPVVYIAESDGSFLLSMLPTVLIIAFLLYTIRRGPAGIGRTGRGMGGLFSVGETTAKVLKDEIDVKFKDVAGCEEAKLEIMEFVNFLKNPKQYQDLGAKIPKGAILTGPPGTGKTLLAKATAGEANVPFITVSGSEFLEMFVGVGPARVRDLFALARKNAPCILFIDEIDAVGRKRGRGNFGGQSEQENTLNQLLVEMDGFNTTTNVVILAGTNRPDILDPALLRPGRFDRQIFIGPPDIKGRASIFKVHLRPLKLDSTLEKDKLARKLASLTPGFSGADVANVCNEAALIAARHLSDSINQKHFEQAIERVIGGLEKKTQVLQPEEKKTVAYHEAGHAVAGWYLEHADPLLKVSIIPRGKGLGYAQYLPKEQYLYTKEQLLDRMCMTLGGRVSEEIFFGRITTGAQDDLRKVTQSAYAQIVQFGMNEKVGQISFDLPRQGDMVLEKPYSEATARLIDDEVRILINDAYKRTVALLTEKKADVEKVALLLLEKEVLDKNDMVELLGPRPFAEKSTYEEFVEGTGSLDEDTSLPEGLKDWNKEREKEKEEPPGEKVAN

SEQ ID NO: 273 - protein, 299 aa, Homo sapiens [sequence omitted]

SEQ ID NO: 274 - protein, 211 aa, Homo sapiens
MDGLRQRVEHFLEQRNLVTEVLGALEAKTGVEKRYLAAGAVTLLSLYLLFGYGASLLCNLIGFVYPAYASIKAIESPSKDDDTVWLTYWVVYALFGLAEFFSDLLLSWFPFYYVGKCAFLLFCMAPRPWNGALMLYQRVVRPLFLRHHGAVDRIMNDLSGRALDAAAGITRNVLQVLARSRAGITPVAVAGPSTPLEADLKPSQTPQPKDK

SEQ ID NO: 275 - protein, 184 aa, Homo sapiens
MFLSPGEGPATEGGGLGPGEEAPKKKHRRNRTTFTTYQLHQLERAFEASHYPDVYSREELAAKVHLPEVRVQVWFQNRRAKWRRQERLESGSGAVAAPRLPEAPALPFARPPAMSLPLEPWLGPGPPAVPGLPRLLGPGPGLQASFGPHAFAPTFADGFALEEASLRLLAKEHAQALDRAWPPA

SEQ ID NO: 276 - protein, 1663 aa, Homo sapiens
MGPTSGPSLLLLLLTHLPLALGSPMYSIITPNILRLESEETMVLEAHDAQGDVPVTVTVHDFPGKKLVLSSEKTVLTPATNHMGNVTFTIPANREFKSEKGRNKFVTVQATFGTQVVEKVVLVSLQSGYLFIQTDKTIYTPGSTVLYRIFTVNHKLLPVGRTVMVNIENPEGIPVKQDSLSSQNQLGVLPLSWDIPELVNMGQWKIRAYYENSPQQVFSTEFEVKEYVLPSFEVIVEPTEKFYYIYNEKGLEVTITARFLYGKKVEGTAFVIFGIQDGEQRISLPESLKRIPIEDGSGEVVLSRKVLLDGVQNPRAEDLVGKSLYVSATVILHSGSDMVQAERSGIPIVTSPYQIHFTKTPKYFKPGMPFDLMVFVTNPDGSPAYRVPVAVQGEDTVQSLTQGDGVAKLSINTHPSQKPLSITVRTKKQELSEAEQATRTMQALPYSTVGNSNNYLHLSVLRTELRPGETLNVNFLLRMDRAHEAKIRYYTYLIMNKGRLLKAGRQVREPGQDLVVLPLSITTDFIPSFRLVAYYTLIGASGQREVVADSVWVDVKDSCVGSLVVKSGQSEDRQPVPGQQMTLKIEGDHGARVVLVAVDKGVFVLNKKNKLTQSKIWDVVEKADIGCTPGSGKDYAGVFSDAGLTFTSSSGQQTAQRAELQCPQPAARRRRSVQLTEKRMDKVGKYPKELRKCCEDGMRENPMRFSCQRRTRFISLGEACKKVFLDCCNYITELRRQHARASHLGLARSNLDEDIIAEENIVSRSEFPESWLWNVEDLKEPPKNGISTKLMNIFLKDSITTWEILAVSMSDKKGICVADPFEVTVMQDFFIDLRLPYSVVRNEQVEIRAVLYNYRQNQELKVRVELLHNPAFCSLATTKRRHQQTVTIPPKSSLSVPYVIVPLKTGLQEVEVKAAVYHHFISDGVRKSLKVVPEGIRMNKTVAVRTLDPERLGREGVQKEDIPPADLSDQVPDTESETRILLQGTPVAQMTEDAVDAERLKHLIVTPSGCGEQNMIGMTPTVIAVHYLDETEQWEKFGLEKRQGALELIKKGYTQQLAFRQPSSAFAAFVKRAPSTWLTAYVVKVFSLAVNLIAIDSQVLCGAVKWLILEKQKPDGVFQEDAPVIHQEMIGGLRNNNEKDMALTAFVLISLQEAKDICEEQVNSLPGSITKAGDFLEANYMNLQRSYTVAIAGYALAQMGRLKGPLLNKFLTTAKDKNRWEDPGKQLYNVEATSYALLALLQLKDFDFVPPVVRWLNEQRYYGGGYGSTQATFMVFQALAQYQKDAPDHQELNLDVSLQLPSRSSKITHRIHWESASLLRSEETKENEGFTVTAEGKGQGTLSVVTMYHAKAKDQLTCNKFDLKVTIKPAPETEKRPQDAKNTMILEICTRYRGDQDATMSILDISMMTGFAPDTDDLKQLANGVDRYISKYELDKAFSDRNTLIIYLDKVSHSEDDCLAFKVHQYFNVELIQPGAVKVYAYYNLEESCTRFYHPEKEDGKLNKLCRDELCRCAEENCFIQKSDDKVTLEERLDKACEPGVDYVYKTRLVKVQLSNDFDEYIMAIEQTIKSGSDEVQVGQQRTFISPIKCREALKLEEKKHYLMWGLSSDFWGEKPNLSYIIGKDTWVEHWPEEDECQDEENQKQCQDLGAFTESMVVFGCPN

SEQ ID NO: 277 - protein, 1361 aa, Homo sapiens
MGDDQEDDFPRRLSESMEDLSLDLGALQGSEYLQDLGLGAPSHSQPGETPDSRPTGEEPGRDSLFSSLAGSQDLSRRRSWERSRSCSESWRRLSLDASAVDEEPCLPRTLASLALNLPGGGLKTWTQGCLSGGGTPAESPGKECDSPKKRGRSRSVPVSFYEIRSPEISPGLEVPTPPVQGLEPPVLECMEKDHVEPDHVLIVQQVLQELRQYHGARQRACMSASPGGAHSNLTWFEFLSESEDGAGKNEKSDKSTSVKRRLSCLRSRVTRQKEKGKSPAHLKDKGQDARERRECVNGHQLLQGTFSGPSSCPLCGKPFLSSASLKEHPRGTLLSDGSPALSRNVGMTVSQKGGPQPTPSPAGPGTQLGPITGEMDEADSAFLKFKQTADDSLSLTSPNTESIFVEDPYTASLRSEIESDGHEFEAESWSLAVDAAYAKKQKREVVKRQDVLYELMQTEVHHVRTLKIMLKVYSRALQEELQFSSKAIGRLFPCADDLLETHSHFLARLKERRQESLEEGSDRNYVIQKIGDLLVQQFSGENGERMKEKYGVFCSGHNEAVSHYKLLLQQNKKFQNLIKKIGNFSIVRRLGVQECILLVTQRITKYPVLVERIIQNTEAGTEDYEDLTQALNLIKDIISQVDAKVSECEKGQRLREIAGKMDLKSSSKLKNGLTFRKEDMLQRQLHLEGMLCWKTTSGRLKDILAILLTDVLLLLQEKDQKYVFASVDSKPPVISLQKLIVREVANEEKAMFLISASLQGPEMYEIYTSSKEDRNAWMAHIQRAVESCPDEEEGPFSLPEEERKVVEARATRLRDFQERLSMKDQLIAQSLLEKQQIYLEMAEMGGLEDLPQPRGLFRGGDPSETLQGELILKSAMSEIEGIQSLICRQLGSANGQAEDGGSSTGPPRRAETFAGYDCTNSPTKNGSFKKKVSSTDPRPRDWRGPPNSPDLKLSDSDIPGSSEESPQVVEAPGTESDPRLPTVLESELVQRIQTLSQLLLNLQAVIAHQDSYVETQRAAIQEREKQFRLQSTRGNLLLEQERQRNFEKQREERAALEKLQSQLRHEQQRWERERQWQHQELERAGARLQEREGEARQLRERLEQERAELERQRQAYQHDLERLREAQRAVERERERLELLRRLKKQNTAPGALPPDTLAEAQPPSHPPSFNGEGLEGPRVSMLPSGVGPEYAERPEVARRDSAPTENRLAKSDVPIQLLSATNQFQRQAAVQQQIPTKLAASTKGGKDKGGKSRGSQRWESSASFDLKQQLLLNKLMGKDESTSRNRRSLSPILPGRHSPAPPPDPGFPAPSPPPADSPSEGFSLKAGGTALLPGPPAPSPLPATPLSAKEDASKEDVIFF

SEQ ID NO: 278 - protein, 1375 aa, Homo sapiens
MEAPLQTGMMGTSSHGLATNSSGAKVAERDGFQDVLAPGEGSAGRICGAQPVPFVPQVLGVMIGAGVAVVVTAVLILLVVRRLRVPKTPAPDGPRYRFRKRDKVLFYGRKIMRKVSQSTSSLVDTSVSATSRPRMRKKLKMLNIAKKILRIQKETPTLQRKEPPPAVLEADLTEGDLANSHLPSEVLYMLKNVRVLGHFEKPLFLELCRHMVFQRLGQGDYVFRPGQPDASIYVVQDGLLELCLPGPDGKECVVKEVVPGDSVNSLLSILDVITGHQHPQRTVSARAARDSTVLRLPVEAFSAVFTKYPESLVRVVQIIMVRLQRVTFLALHNYLGLTNELFSHEIQPLRLFPSPGLPTRTSPVRGSKRMVSTSATDEPRETPGRPPDPTGAPLPGPTGDPVKPTSLETPSAPLLSRCVSMPGDISGLQGGPRSDFDMAYERGRISVSLQEEASGGSLAAPARTPTQEPREQPAGACEYSYCEDESATGGCPFGPYQGRQTSSIFEAAKQELAKLMRIEDPSLLNSRVLLHHAKAGTIIARQGDQDVSLHFVLWGCLHVYQRMIDKAEDVCLFVAQPGELVGQLAVLTGEPLIFTLRAQRDCTFLRISKSDFYEIMRAQPSVVLSAAHTVAARMSPFVRQMDFAIDWTAVEAGRALYRQGDRSDCTYIVLNGRLRSVIQRGSGKKELVGEYGRGDLIGVVEALTRQPRATTVHAVRDTELAKLPEGTLGHIKRRYPQVVTRLIHLLSQKILGNLQQLQGPFPAGSGLGVPPHSELTNPASNLATVAILPVCAEVPMVAFTLELQHALQAIGPTLLLNSDIIRARLGASALDSIQEFRLSGWLAQQEDAHRIVLYQTDASLTPWTVRCLRQADCILIVGLGDQEPTLGQLEQMLENTAVRALKQLVLLHREEGAGPTRTVEWLNMRSWCSGHLHLRCPRRLFSRRSPAKLHELYEKVFSRRADRHSDFSRLARVLTGNTIALVLGGGGARGCSHIGVLKALEEAGVPVDLVGGTSIGSFIGALYAEERSASRTKQRAREWAKSMTSVLEPVLDLTYPVTSMFTGSAFNRSIHRVFQDKQIEDLWLPYFNVTTDITASAMRVHKDGSLWRYVRASMTLSGYLPPLCDPKDGHLLMDGGYINNLPADIARSMGAKTVIAIDVGSQDETDLSTYGDSLSGWWLLWKRLNPWADKVKVPDMAEIQSRLAYVSCVRQLEVVKSSSYCEYLRPPIDCFKTMDFGKFDQIYDVGYQYGKAVFGGWSRGNVIEKMLTDRRSTDLNESRRADVLAFPSSGFTDLAEIVSRIEPPTSYVSDGCADGEESDCLTEYEEDAGPDCSRDEGGSPEGASPSTASEMEEEKSILRQRRCLPQEPPGSATDA

SEQ ID NO: 279 - protein, 235 aa, Homo sapiens
MAREECKALLDGLNKTTACYHHLVLTVGGSADSQNLRQELQKTRQKAQELAVSTCARLTAVLRDRGLAADERAEFERLWVAFSGCLDLLEADMRRALELGAAFPLHAPRRPLVRTGVAGASSGVAARALSTRSLRLEAEGDFDVADLRELEREVLQVGEMIDNMEMKVNVPRWTVQARQAAGAELLSTVSAGPSSVVSLQERGGGCDPRKALAAILFGAVLLAAVALAVCVAKLS

SEQ ID NO: 280 - protein, 179 aa, Homo sapiens
MVVGAFPMAKLLYLGIRQVSKPLANRIKEAARRSEFFKTYICLPPAQLYHWVEMRTKMRIMGFRGTVIKPLNEEAAAELGAELLGEATIFIVGGGCLVLEYWRHQAQQRHKEEEQRAAWNALRDEVGHLALALEALQAQVQAAPPQGALEELRTELQEVRAQLCNPGRSASHAVPASKK

SEQ ID NO: 281 - protein, 499 aa, Homo sapiens
MSLADELLADLEEAAEEEEGGSYGEEEEEPAIEDVQEETQLDLSGDSVKTIAKLWDSKMFAEIMMKIEEYISKQAKASEVMGPVEAAPEYRVIVDANNLTVEIENELNIIHKFIRDKYSKRFPELESLVPNALDYIRTVKELGNSLDKCKNNENLQQILTNATIMVVSVTASTTQGQQLSEEELERLEEACDMALELNASKHRIYEYVESRMSFIAPNLSIIIGASTAAKIMGVAGGLTNLSKMPACNIMLLGAQRKTLSGFSSTSVLPHTGYIYHSDIVQSLPPDLRRKAARLVAAKCTLAARVDSFHESTEGKVGYELKDEIERKFDKWQEPPPVKQVKPLPAPLDGQRKKRGGRRYRKMKERLGLTEIRKQANRMSFGEIEEDAYQEDLGFSLGHLGKSGSGRVRQTQVNEATKARISKTLQRTLQKQSVVYGGKSTIRDRSSGTASSVAFTPLQGLEIVNPQAAEKKVAEANQKYFSSMAEFLKVKGEKSGLMST

SEQ ID NO: 282 - protein, 385 aa, Homo sapiens
MAALSGVRWLTRALVSAGNPGAWRGLSTSAAAHAASRSQAEDVRVEGSFPVTMLPGDGVGPELMHAVKEVFKAAAVPVEFQEHHLSEVQNMASEEKLEQVLSSMKENKVAIIGKIHTPMEYKGELASYDMRLRRKLDLFANVVHVKSLPGYMTRHNNLDLVIIREQTEGEYSSLEHESARGVIECLKIVTRAKSQRIAKFAFDYATKKGRGKVTAVHKANIMKLGDGLFLQCCEEVAELYPKIKFETMIIDNCCMQLVQNPYQFDVLVMPNLYGNIIDNLAAGLVGGAGVVPGESYSAEYAVFETGARHPFAQAVGRNIANPTAMLLSASNMLRHLNLEYHSSMIADAVKKVIKVGKVRTRDMGGYSTTTDFIKSVIGHLQTKGS

SEQ ID NO: 283 - protein, 570 aa, Homo sapiens
MRRLGPFHPRVHWAAPPSLSSGLHRLLFLRGTRIPSSTTLSPPRHDSLSLDGGTVNPPRVREPTGREAFGPSPASSDWLPARWRNGRGGRPRARLCSGWTAAEEARRNPTLGGLLGRQRLLLRMGGGRLGAPMERHGRASATSVSSAGEQAAGDPEGRRQEPLRRRASSASVPAVGASAEGTRRDRLGSYSGPTSVSRQRVESLRKKRPLFPWFGLDIGGTLVKLVYFEPKDITAEEEEEEVESLKSIRKYLTSNVAYGSTGIRDVHLELKDLTLCGRKGNLHFIRFPTHDMPAFIQMGRDKNFSSLHTVFCATGGGAYKFEQDFLTIGDLQLCKLDELDCLIKGILYIDSVGFNGRSQCYYFENPADSEKCQKLPFDLKNPYPLLLVNIGSGVSILAVYSKDNYKRVTGTSLGGGTFFGLCCLLTGCTTFEEALEMASRGDSTKVDKLVRDIYGGDYERFGLPGWAVASSFGNMMSKEKREAVSKEDLARATLITITNNIGSIARMCALNENINQVVFVGNFLRINTIAMRLLAYALDYWSKGQLKALFSEHEGYFGAVGALLELLKIP

SEQ ID NO: 284 - protein, 1218 aa, Homo sapiens
MRSPRTRGRSGRPLSLLLALLCALRAKVCGASGQFELEILSMQNVNGELQNGNCCGGARNPGDRKCTRDECDTYFKVCLKEYQSRVTAGGPCSFGSGSTPVIGGNTFNLKASRGNDRNRIVLPFSFAWPRSYTLLVEAWDSSNDTVQPDSIIEKASHSGMINPSRQWQTLKQNTGVAHFEYQIRVTCDDYYYGFGCNKFCRPRDDFFGHYACDQNGNKTCMEGWMGPECNRAICRQGCSPKHGSCKLPGDCRCQYGWQGLYCDKCIPHPGCVHGICNEPWQCLCETNWGGQLCDKDLNYCGTHQPCLNGGTCSNTGPDKYQCSCPEGYSGPNCEIAEHACLSDPCHNRGSCKETSLGFECECSPGWTGPTCSTNIDDCSPNNCSHGGTCQDLVNGFKCVCPPQWTGKTCQLDANECEAKPCVNAKSCKNLIASYYCDCLPGWMGQNCDININDCLGQCQNDASCRDLVNGYRCICPPGYAGDHCERDIDECASNPCLNGGHCQNEINRFQCLCPTGFSGNLCQLDIDYCEPNPCQNGAQCYNRASDYFCKCPEDYEGKNCSHLKDHCRTTPCEVIDSCTVAMASNDTPEGVRYISSNVCGPHGKCKSQSGGKFTCDCNKGFTGTYCHENINDCESNPCRNGGTCIDGVNSYKCICSDGWEGAYCETNINDCSQNPCHNGGTCRDLVNDFYCDCKNGWKGKTCHSRDSQCDEATCNNGGTCYDEGDAFKCMCPGGWEGTTCNIARNSSCLPNPCHNGGTCVVNGESFTCVCKEGWEGPICAQNTNDCSPHPCYNSGTCVDGDNWYRCECAPGFAGPDCRININECQSSPCAFGATCVDEINGYRCVCPPGHSGAKCQEVSGRPCITMGSVIPDGAKWDDDCNTCQCLNGRIACSKVWCGPRPCLLHKGHSECPSGQSCIPILDDQCFVHPCTGVGECRSSSLQPVKTKCTSDSYYQDNCANITFTFNKEMMSPGLTTEHICSELRNLNILKNVSAEYSIYIACEPSPSANNEIHVAISAEDIRDDGNPIKEITDKIIDLVSKRDGNSSLIAAVAEVRVQRRPLKNRTDFLVPLLSSVLTVAWICCLVTAFYWCLRKRRKPGSHTHSASEDNTTNNVREQLNQIKNPIEKHGANTVPIKDYENKNSKMSKIRTHNSEVEEDDMDKHQQKARFAKQPAYTLVDREEKPPNGTPTKHPNWTNKQDNRDLESAQSLNRMEYIV

SEQ ID NO: 285 - protein, 570 aa, Homo sapiens
MSRLEAKKPSLCKSEPLTTERVRTTLSVLKRIVTSCYGPSGRLKQLHNGFGGYVCTTSQSSALLSHLLVTHPILKILTASIQNHVSSFSDCGLFTAILCCNLIENVQRLGLTPTTVIRLNKHLLSLCISYLKSETCGCRIPVDFSSTQILLCLVRSILTSKPACMLTRKETEHVSALILRAFLLTIPENAEGHIILGKSLIVPLKGQRVIDSTVLPGILIEMSEVQLMRLLPIKKSTALKVALFCTTLSGDTSDTGEGTVVVSYGVSLENAVLDQLLNLGRQLISDHVDLVLCQKVIHPSLKQFLNMHRIIAIDRIGVTLMEPLTKMTGTQPIGSLGSICPNSYGSVKDVCTAKFGSKHFFHLIPNEATICSLLLCNRNDTAWDELKLTCQTALHVLQLTLKEPWALLGGGCTETHLAAYIRHKTHNDPESILKDDECTQTELQLIAEAFCSALESVVGSLEHDGGEILTDMKYGHLWSVQADSPCVANWPDLLSQCGCGLYNSQEELNWSFLRSTRRPFVPQSCLPHEAVGSASNLTLDCLTAKLSGLQVAVETANLILDLSYVIEDKN

SEQ ID NO: 286 - protein, 673 aa, Homo sapiens
MSRTLASAVPLSSPDYYERLGQLQHGLRDSEKKRLDLEKKLYEYNQSDTCRVKLKYVKLKNYLKEICESEKKAHTRNQEYLKRFERVQAHVVHFTTNTEKLQKLKLEYETQIKKMLCSKDSLGLKEELTDEDREKVAVHEGINSGTAMSRGLYQPATIFMGRQMSAILSMRDFSTEHKSPQPTKNFSIPDPHSHRQTAQSSNVTDSCVVQTSNDTQCLNKSDNIDGKASLQIGEKMPVTASVLSEEEQTHCLEIGSNTRHGKSNLSEGKKSAELNSPLRERLSPENRTTDLKCDSSSGSEGEILTREHIEVEEKRASPPVSPIPVSEYCESENKWSQEKHSPWEGVSDHLAHREPKSQKPFRKMQEEEEESWSTSSDLTISISEDDLILESPEPQPNPGGKMEGEDGIEALKLIHAEQERVALSTEKNCILQTLSSPDSEKESSTNAPTREPGQTPDSDVPRAQVGQHVATLKEHDNSVKEEATALLRKALTEECGRRSAIHSSESSCSLPSILNDNSGIKEAKPAVWLNSVPTREQEVSSGCGDKSKKENVAADIPITETEAYQLLKKATLQDNTNQTENRFQKTDASVSHLSGLNIGSGAFETKTANKIASEASFSSSEGSPLSRHENKKKPVINLKSNALWDESDDSNSEIEAALRPRNHNTDDSDDFYD

SEQ ID NO: 287 - protein, 398 aa, Homo sapiens
MRKRTEPVALEHERCAAAGSSSSGSAAAALDADCRLKQNLRLTGPAAAEPRCAADAGMKRALGRRKGVWLRLRKILFCVLGLYIAIPFLIKLCPGIQAKLIFLNFVRVPYFIDLKKPQDQGLNHTCNYYLQPEEDVTIGVWHTVPAVWWKNAQGKDQMWYEDALASSHPIILYLHGNAGTRGGDHRVELYKVLSSLGYHVVTFDYRGWGDSVGTPSERGMTYDALHVFDWIKARSGDNPVYIWGHSLGTGVATNLVRRLCERETPPDALILESPFTNIREEAKSHPFSVIYRYFPGFDWFFLDPITSSGIKFANDENVKHISCPLLILHAEDDPVVPFQLGRKLYSIAAPARSFRDFKVQFVPFHSDLGYRHKYIYKSPELPRILREFLGKSEPEHQH

SEQ ID NO: 288 - protein, 747 aa, Homo sapiens
MSKLKSSESVRVVVRCRPMNGKEKAASYDKVVDVDVKLGQVSVKNPKGTAHEMPKTFTFDAVYDWNAKQFELYDETFRPLVDSVLQGFNGTIFAYGQTGTGKTYTMEGIRGDPEKRGVIPNSFDHIFTHISRSQNQQYLVRASYLEIYQEEIRDLLSKDQTKRLELKERPDTGVYVKDLSSFVTKSVKEIEHVMNVGNQNRSVGATNMNEHSSRSHAIFVITIECSEVGLDGENHIRVGKLNLVDLAGSERQAKTGAQGERLKEATKINLSLSALGNVISALVDGKSTHIPYRDSKLTRLLQDSLGGNAKTVMVANVGPASYNVEETLTTLRYANRAKNIKNKPRVNEDPKDALLREFQEEIARLKAQLEKRSIGRRKRREKRREGGGSGGGGEEEEEEGEEGEEEGDDKDDYWREQQEKLEIEKRAIVEDHSLVAEEKMRLLKEKEKKMEDLRREKDAAEMLGAKIKAMESKLLVGGKNIVDHTNEQQKILEQKRQEIAEQKRREREIQQQMESRDEETLELKETYSSLQQEVDIKTKKLKKLFSKLQAVKAEIHDLQEEHIKERQELEQTQNELTRELKLKHLIIENFIPLEEKSKIMNRAFFDEEEDHWKLHPITRLENQQMMKRPVSAVGYKRPLSQHARMSMMIRPEARYRAENIVLLELDMPSRTTRDYEGPAIAPKVQAALDAALQDEDEIQVDASSFESTANKKSKARPKSGRKSGSSSSSSGTPASQLYPQSRGLVPK

SEQ ID NO: 289 - protein, 2442 aa, Homo sapiens
METRSPGLNNMKPQSLQLVLEEQVLALQQQMAENQAASWRKLKNSQEAQQRQATLVRKLQAKVLQYRSWCQELEKRLEATGGPIPQRWENVEEPNLDELLVRLEEEQQRCESLAEVNTQLRLHMEKADVVNKALREDVEKLTVDWSRARDELMRKESQWQMEQEFFKGYLKGEHGRLLSLWREVVTFRRHFLEMKSATDRDLMELKAEHVRLSGSLLTCCLRLTVGAQSREPNGSGRMDGREPAQLLLLLAKTQELEKEAHERSQELIQLKSQGDLEKAELQDRVTELSALLTQSQKQNEDYEKMIKALRETVEILETNHTELMEHEASLSRNAQEEKLSLQQVIKDITQVMVEEGDNIAQGSGHENSLELDSSIFSQFDYQDADKALTLVRSVLTRRRQAVQDLRQQLAGCQEAVNLLQQQHDQWEEEGKALRQRLQKLTGERDTLAGQTVDLQGEVDSLSKERELLQKAREELRQQLEVLEQEAWRLRRVNVELQLQGDSAQGQKEEQQEELHLAVRERERLQEMLMGLEAKQSESLSELITLREALESSHLEGELLRQEQTEVTAALARAEQSIAELSSSENTLKTEVADLRAAAVKLSALNEALALDKVGLNQQLLQLEEENQSVCSRMEAAEQARNALQVDLAEAEKRREALWEKNTHLEAQLQKAEEAGAELQADLRDIQEEKEEIQKKLSESRHQQEAATTQLEQLHQEAKRQEEVLARAVQEKEALVREKAALEVRLQAVERDRQDLAEQLQGLSSAKELLESSLFEAQQQNSVIEVTKGQLEVQIQTVTQAKEVIQGEVRCLKLELDTERSQAEQERDAAARQLAQAEQEGKTALEQQKAAHEKEVNQLREKWEKERSWHQQELAKALESLEREKMELEMRLKEQQTEMEAIQAQREEERTQAESALCQMQLETEKERVSLLETLLQTQKELADASQQLERLRQDMKVQKLKEQETTGILQTQLQEAQRELKEAARQHRDDLAALQEESSSLLQDKMDLQKQVEDLKSQLVAQDDSQRLVEQEVQEKLRETQEYNRIQKELEREKASLTLSLMEKEQRLLVLQEADSIRQQELSALRQDMQEAQGEQKELSAQMELLRQEVKEKEADFLAQEAQLLEELEASHITEQQLRASLWAQEAKAAQLQLRLRSTESQLEALAAEQQPGNQAQAQAQLASLYSALQQALGSVCESRPELSGGGDSAPSVWGLEPDQNGARSLFKRGPLLTALSAEAVASALHKLHQDLWKTQQTRDVLRDQVQKLEERLTDTEAEKSQVHTELQDLQRQLSQNQEEKSKWEGKQNSLESELMELHETMASLQSRLRRAELQRMEAQGERELLQAAKENLTAQVEHLQAAVVEARAQASAAGILEEDLRTARSALKLKNEEVESERERAQALQEQGELKVAQGKALQENLALLTQTLAEREEEVETLRGQIQELEKQREMQKAALELLSLDLKKRNQEVDLQQEQIQELEKCRSVLEHLPMAVQEREQKLTVQREQIRELEKDRETQRNVLEHQLLELEKKDQMIESQRGQVQDLKKQLVTLECLALELEENHHKMECQQKLIKELEGQRETQRVALTHLTLDLEERSQELQAQSSQIHDLESHSTVLARELQERDQEVKSQREQIEELQRQKEHLTQDLERRDQELMLQKERIQVLEDQRTRQTKILEEDLEQIKLSLRERGRELTTQRQLMQERAEEGKGPSKAQRGSLEHMKLILRDKEKEVECQQEHIHELQELKDQLEQQLQGLHRKVGETSLLLSQREQEIVVLQQQLQEAREQGELKEQSLQSQLDEAQRALAQRDQELEALQQEQQQAQGQEERVKEKADALQGALEQAHMTLKERHGELQDHKEQARRLEEELAVEGRRVQALEEVLGDLRAESREQEKALLALQQQCAEQAQEHEVETRALQDSWLQAQAVLKERDQELEALRAESQSSRHQEEAARARAEALQEALGKAHAALQGKEQHLLEQAELSRSLEASTATLQASLDACQAHSRQLEEALRIQEGEIQDQDLRYQEDVQQLQQALAQRDEELRHQQEREQLLEKSLAQRVQENMIQEKQNLGQEREEEEIRGLHQSVRELQLTLAQKEQEILELRETQQRNNLEALPHSHKTSPMEEQSLKLDSLEPRLQRELERLQAALRQTEAREIEWREKAQDLALSLAQTKASVSSLQEVAMFLQASVLERDSEQQRLQDELELTRRALEKERLHSPGATSTAELGSRGEQGVQLGEVSGVEAEPSPDGMEKQSWRQRLEHLQQAVARLEIDRSRLQRHNVQLRSTLEQVERERRKLKREAMRAAQAGSLEISKATASSPTQQDGRGQKNSDAKCVAELQKEVVLLQAQLTLERKQKQDYITRSAQTSRELAGLHHSLSHSLLAVAQAPEATVLEAETRRLDESLTQSLTSPGPVLLHPSPSTTQAASR

SEQ ID NO: 290 - protein, 941 aa, Homo sapiens
MNKKKKPFLGMPAPLGYVPGLGRGATGFTTRSDIGPARDANDPVDDRHAPPGKRTVGDQMKKNQAADDDDEDLNDTNYDEFNGYAGSLFSSGPYEKDDEEADAIYAALDKRMDERRKERREQREKEEIEKYRMERPKIQQQFSDLKRKLAEVTEEEWLSIPEVGDARNKRQRNPRYEKLTPVPDSFFAKHLQTGENHTSVDPRQTQFGGLNTPYPGGLNTPYPGGMTPGLMTPGTGELDMRKIGQARNTLMDMRLSQVSDSVSGQTVVDPKGYLTDLNSMIPTHGGDINDIKKARLLLKSVRETNPHHPPAWIASARLEEVTGKLQVARNLIMKGTEMCPKSEDVWLEAARLQPGDTAKAVVAQAVRHLPQSVRIYIRAAELETDIRAKKRVLRKALEHVPNSVRLWKAAVELEEPEDARIMLSRAVECCPTSVELWLALARLETYENARKVLNKARENIPTDRHIWITAAKLEEANGNTQMVEKIIDRAITSLRANGVEINREQWIQDAEECDRAGSVATCQAVMRAVIGIGIEEEDRKHTWMEDADSCVAHNALECARAIYAYALQVFPSKKSVWLRAAYFEKNHGTRESLEALLQRAVAHCPKAEVLWLMGAKSKWLAGDVPAARSILALAFQANPNSEEIWLAAVKLESENDEYERARRLLAKARSSAPTARVFMKSVKLEWVQDNIRAAQDLCEEALRHYEDFPKLWMMKGQIEEQKEMMEKAREAYNQGLKKCPHSTPLWLLLSRLEEKIGQLTRARAILEKSRLKNPKNPGLWLESVRLEYRAGLKNIANTLMAKALQECPNSGILWSEAIFLEARPQRRTKSVDALKKCEHDPHVLLAVAKLFWSQRKITKAREWFHRTVKIDSDLGDAWAFFYKFELQHGTEEQQEEVRKRCESAEPRHGELWCAVSKDIANWQKKIGDILRLVAGRIKNTF

SEQ ID NO: 291 - protein, 256 aa, Homo sapiens
MKLTRKMVLTRAKASELHSVRKLNCWGSRLTDISICQEMPSLEVITLSVNSISTLEPVSRCQRLSELYLRRNRIPSLAELFYLKGLPRLRVLWLAENPCCGTSPHRYRMTVLRTLPRLQKLDNQAVTEEELSRALSEGEEITAAPEREGTGHGGPKLCCTLSSLSSAAETGRDPLDSEEEATSGAQDERGLKPPSRGQFPSLSARDASSSHRGRNVLTAILLLLRELDAEGLEAVQQTVGSRLQALRGEEVQEHAE

SEQ ID NO: 292 - protein, 736 aa, Homo sapiens
MEALIPVINKLQDVFNTVGADIIQLPQIVVVGTQSSGKSSVLESLVGRDLLPRGTGIVTRRPLILQLVHVSQEDKRKTTGEENGVEAEEWGKFLHTKNKLYTDFDEIRQEIENETERISGNNKGVSPEPIHLKIFSPNVVNLTLVDLPGMTKVPVGDQPKDIELQIRELILRFISNPNSIILAVTAANTDMATSEALKISREVDPDGRRTLAVITKLDLMDAGTDAMDVLMGRVIPVKLGIIGVVNRSQLDINNKKSVTDSIRDEYAFLQKKYPSLANRNGTKYLARTLNRLLMHHIRDCLPELKTRINVLAAQYQSLLNSYGEPVDDKSATLLQLITKFATEYCNTIEGTAKYIETSELCGGARICYIFHETFGRTLESVDPLGGLNTIDILTAIRNATGPRPALFVPEVSFELLVKRQIKRLEEPSLRCVELVHEEMQRIIQHCSNYSTQELLRFPKLHDAIVEVVTCLLRKRLPVTNEMVHNLVAIELAYINTKHPDFADACGLMNNNIEEQRRNRLARELPSAVSRDKSSKVPSALAPASQEPSPAASAEADGKLIQDSRRETKNVASGGGGVGDGVQEPTTGNWRGMLKTSKAEELLAEEKSKPIPIMPASPQKGHAVNLLDVPVPVARKLSAREQRDCEVIERLIKSYFLIVRKNIQDSVPKAVMHFLVNHVKDTLQSELVGQLYKSSLLDDLLTESEDMAQRRKEAADMLKALQGASQIIAEIRETHLW

SEQ ID NO: 293 - protein, 211 aa, Homo sapiens
MTPWLGLIVLLGSWSLGDWGAEACTCSPSHPQDAFCNSDIVIRAKVVGKKLVKEGPFGTLVYTIKQMKMYRGFTKMPHVQYIHTEASESLCGLKLEVNKYQYLLTGRVYDGKMYTGLCNFVERWDQLTLSQRKGLNYRYHLGCNCKIKSCYYLPCFVTSKNECLWTDMLSNFGYPGYQSKHYACIRQKGGYCSWYRGWAPPDKSIINATDP

SEQ ID NO: 294 - protein, 186 aa, Homo sapiens
MVKLAAKCILAGDPAVGKTALAQIFRSDGAHFQKSYTLTTGMDLVVKTVPVPDTGDSVELFIFDSAGKELFSEMLDKLWESPNVLCLVYDVTNEESFNNCSKWLEKARSQAPGISLPGVLVGNKTDLAGRRAVDSAEARAWALGQGLECFETSVKEMENFEAPFHCLAKQFHQLYREKVEVFRALA

SEQ ID NO: 295 - protein, 703 aa, Homo sapiens
MERAAPSRRVPLPLLLLGGLALLAAGVDADVLLEACCADGHRMATHQKDCSLPYATESKECRMVQEQCCHSQLEELHCATGISLANEQDRCATPHGDNASLEATFVKRCCHCCLLGRAAQAQGQSCEYSLMVGYQCGQVFQACCVKSQETGDLDVGGLQETDKIIEVEEEQEDPYLNDRCRGGGPCKQQCRDTGDEVVCSCFVGYQLLSDGVSCEDVNECITGSHSCRLGESCINTVGSFRCQRDSSCGTGYELTEDNSCKDIDECESGIHNCLPDFICQNTLGSFRCRPKLQCKSGFIQDALGNCIDINECLSISAPCPIGHTCINTEGSYTCQKNVPNCGRGYHLNEEGTRCVDVDECAPPAEPCGKGHRCVNSPGSFRCECKTGYYFDGISRMCVDVNECQRYPGRLCGHKCENTLGSYLCSCSVGFRLSVDGRSCEDINECSSSPCSQECANVYGSYQCYCRRGYQLSDVDGVTCEDIDECALPTGGHICSYRCINIPGSFQCSCPSSGYRLAPNGRNCQDIDECVTGIHNCSINETCFNIQGGFRCLAFECPENYRRSAATLQQEKTDTVRCIKSCRPNDVTCVFDPVHTISHTVISLPTFREFTRPEEIIFLRAITPPHPASQANIIFDITEGNLRDSFDIIKRYMDGMTVGVVRQVRPIVGPFHAVLKLEMNYVVGGVVSHRNVVNVHIFVSEYWF

SEQ ID NO: 296 - protein, 70 aa, Homo sapiens
MAPWSREAVLSLYRALLRQGRQLRYTDRDFYFASIRREFRKNQKLEDAEARERQLEKGLVFLNGKLGRII

SEQ ID NO: 297 - protein, 780 aa, Homo sapiens
MAPYSLLVTRLQKALGVRQYHVASVLCQRAKVAMSHFEPNEYIHYDLLEKNINIVRKRLNRPLTLSEKIVYGHLDDPASQEIERGKSYLRLRPDRVAMQDATAQMAMLQFISSGLSKVAVPSTIHCDHLIEAQVGGEKDLRRAKDINQEVYNFLATAGAKYGVGFWKPGSGIIHQIILENYAYPGVLLIGTDSHTPNGGGLGGICIGVGGADAVDVMAGIPWELKCPKVIGVKLTGSLSGWSSPKDVILKVAGILTVKGGTGAIVEYHGPGVDSISCTGMATICNMGAEIGATTSVFPYNHRMKKYLSKTGREDIANLADEFKDHLVPDPGCHYDQLIEINLSELKPHINGPFTPDLAHPVAEVGKVAEKEGWPLDIRVGLIGSCTNSSYEDMGRSAAVAKQALAHGLKCKSQFTITPGSEQIRATIERDGYAQILRDLGGIVLANACGPCIGQWDRKDIKKGEKNTIVTSYNRNFTGRNDANPETHAFVTSPEIVTALAIAGTLKFNPETDYLTGTDGKKFRLEAPDADELPKGEFDPGQDTYQHPPKDSSGQHVDVSPTSQRLQLLEPFDKWDGKDLEDLQILIKVKGKCTTDHISAAGPWLKFRGHLDNISNNLLIGAINIENGKANSVRNAVTQEFGPVPDTARYYKKHGIRWVVIGDENYGEGSSREHAALEPRHLGGRAIITKSFARIHETNLKKQGLLPLTFADPADYNKIHPVDKLTIQGLKDFTPGKPLKCIIKHPNGTQETILLNHTFNETQIEWFRAGSALNRMKELQQ

SEQ ID NO: 298 - protein, 1819 aa, Homo sapiens
MASITQLFDDLCEALLPAAKTHLGQRSVNRKRAKRSLKKVAYNALFTNLFQDETQQLQPDMSKLPARNKILMLSFDLRVGGLGPKADRLEELVEELEAAPCCPLLEVGSVLDLLVQLAGSGPPQVLPRKRDYFLNNKHVGRNVPYSGYDCDDLSVFEMDVQSLISREECLCHSMIQETLQVMEAAPGTGLPTVGLFSFGDPCGDRFERDTRVSLFGALVHSRTYDMDVRLGLPPVPDNADLSGLAIKVPPSVDQWEDEGFQSASNLTPDSQSEPSVTPDVDLWEAALTYEASKRRCWERVGCPPGHREEPYLTEAGRDAFDKFCRLHQGELQLLAGGVLQAPQPVLVKECELVKDVLNVLIGVVSATFSLCQPAQAFVVKRGVHVSGASPESISSLLSEVAEYGTCYTRLSHFSLQPVLDSLYSKGLVFQAFTSGLRRYLQYYRACVLSTPPTLSLLTIGFLFKKLGRQLRYLAELCGVGAVLPGTCGGGPRAAFPTGVKLLSYLYQEALHNCSNEHYPVLLSLLKTSCEPYTRFIHDWVYSGVFRDAYGEFMIQVNHEYLSFRDKLYWTHGYVLISKEVEDCVPVFLKHIAHDIYVCGKTINLLKLCCPRHYLCWSDVPVPRISVIFSLEELKEIEKDCAVYVGRMERVARHSSVSKEEKELRMEIAKQELIAHAREAASRVLSALSDRQMSERMALDARKREQFQRLKEQFVKDQERRQAARQEELDDDFSYARELRDRERRLKSLEEELERKARQALVDHYSKLSAEAARREQKALWRIQRHRLESARLRFLLEDEKHIQEMLKAVSEAHQPQEPPDVLLSVHPQVTSPGPEHPEGGQGCDSGSAEQHSPAWDGWNRPGLLTPQPLKPLAVGAGGRGLQQAEGARPFSDSLSIGDFLPVGPGAEPSVQTGMVPLLEVALQTINLDLPPSAPGEAPAAASTQPSRPQEYDFSTVLRPAVATSPAPGPLQAAECSLGSSGLQLWEDSCGKMDACGSASRETLLPSHPPRRAALEEGSSQPTERLFGQVSGGGLPTGDYASEIAPTRPRWNTHGHVSDASIRVGENVSDVAPTQPRWNTHGHVSNASISLGESVSDVAPTRPRWNIHGHVSNASIRVGENVSDVAPTRPRWNTHGHVSNASIRVGENVSDVAPTRPRWNTHGHVSDASISLGESVSDMAPARPRWNTHGHVSDASISLGESVSDMAPTRPRWNTHGHVSDTSIRVGENVSDVAPIRSRCNTHGHVSDASISLGEPVSDVVSTRPRWNTHVPIPPPHMVLGALSPEAEPNTPRPQQSPPGHTSQSALSLGAQSTVLDCGPRLPVEVGPSLSSPSSGCGEGSISVGENVSDVAPTQPWWPNTPGDSVSEELGPGRSGDTEDLSPNWPLNSQEDTAAQSSPGRGEEAEASAAEAQGGEQAYLAGLAGQYHLERYPDSYESMSEPPIAHLLRPVLPRAFAFPVDPQVQSAADETAVQLSELLTLPVLMKRSITAPLAAHISLVNKAAVDYFFVELHLEAHYEALRHFLLMEDGEFAQSLSDLLFEKLGAGQTPGELLNPLVLNSVLSKALQCSLHGDTPHASNLSLALKYLPEVFAPNAPDVLSCLELRYKVDWPLNIVITEGCVSKYSGVFSFLLQLKLMMWALKDVCFHLKRTALLSHMAGSVQFRQLQLFKHEMQHFVKVIQGYIANQILHVTWCEFRARLATVGDLEEIQRAHAEYLHKAVFRGLLTEKAAPVMNVIHSIFSLVLKFRSQLISQAWGPPGGPRGAEHPNFALMQQSYNTFKYYSHFLFKVVTKLVNRGYQPHLEDFLLRINFNNYYQDA

SEQ ID NO: 299 - protein, 1012 aa, Homo sapiens
MMAQSNMFTVADVLSQDELRKKLYQTFKDRGILDTLKTQLRNQLIHELMHPVLSGELQPRSISVEGSSLLIGASNSLVADHLQRCGYEYSLSVFFPESGLAKEKVFTMQDLLQLIKINPTSSLYKSLVSGSDKENQKGFLMHFLKELAEYHQAKESCNMETQTSSTFNRDSLAEKLQLIDDQFADAYPQRIKFESLEIKLNEYKREIEEQLRAEMCQKLKFFKDTEIAKIKMEAKKKYEKELTMFQNDFEKACQAKSEALVLREKSTLERIHKHQEIETKEIYAQRQLLLKDMDLLRGREAELKQRVEAFELNQKLQEEKHKSITEALRRQEQNIKSFEETYDRKLKNELLKYQLELKDDYIIRTNRLIEDERKNKEKAVHLQEELIAINSKKEELNQSVNRVKELELELESVKAQSLAITKQNHMLNEKVKEMSDYSLLKEEKLELLAQNKLLKQQLEESRNENLRLLNRLAQPAPELAVFQKELRKAEKAIVVEHEEFESCRQALHKQLQDEIEHSAQLKAQILGYKASVKSLTTQVADLKLQLKQTQTALENEVYCNPKQSVIDRSVNGLINGNVVPCNGEISGDFLNNPFKQENVLARMVASRITNYPTAWVEGSSPDSDLEFVANTKARVKELQQEAERLEKAFRSYHRRVIKNSAKSPLAAKSPPSLHLLEAFKNITSSSPERHIFGEDRVVSEQPQVGTLEERNDVVEALTGSAASRLRGGTSSRRLSSTPLPKAKRSLESEMYLEGLGRSHIASPSPCPDRMPLPSPTESRHSLSIPPVSSPPEQKVGLYRRQTELQDKSEFSDVDKLAFKDNEEFESSFESAGNMPRQLEMGGLSPAGDMSHVDAAAAAVPLSYQHPSVDQKQIEEQKEEEKIREQQVKERRQREERRQSNLQEVLERERRELEKLYQERKMIEESLKIKIKKELEMENELEMSNQEIKDKSAHSENPLEKYMKIIQQEQDQESADKSSKKMVQEGSLVDTLQSSDKVESLTGFSHEELDDSW

SEQ ID NO: 300 - protein, 224 aa, Homo sapiens
MSRKIEGFLLLLLFGYEATLGLSSTEDEGEDPWYQKACKCDCQGGPNALWSAGATSLDCIPECPYHKPLGFESGEVTPDQITCSNPEQYVGWYSSWTANKARLNSQGFGCAWLSKFQDSSQWLQIDLKEIKVISGILTQGRCDIDEWMTKYSVQYRTDERLNWIYYKDQTGNNRVFYGNSDRTSTVQNLLRPPIISRFIRLIPLGWHVRIAIRMELLECVSKCA

SEQ ID NO: 301 - protein, 350 aa, Homo sapiens
MGCFFSKRRKADKESRPENEEERPKQYSWDQREKVDPKDYMFSGLKDETVGRLPGTVAGQQFLIQDCENCNIYIFDHSATVTIDDCTNCIIFLGPVKGSVFFRNCRDCKCTLACQQFRVRDCRKLEVFLCCATQPIIESSSNIKFGCFQWYYPELAFQFKDAGLSIFNNTWSNIHDFTPVSGELNWSLLPEDAVVQDYVPIPTTEELKAVRVSTEANRSIVPISRGQRQKSSDESCLVVLFAGDYTIANARKLIDEMVGKGFFLVQTKEVSMKAEDAQRVFREKAPDFLPLLNKGPVIALEFNGDGAVEVCQLIVNEIFNGTKMFVSESKETASGDVDSFYNFADIQMGI

SEQ ID NO: 302 - protein, 3685 aa, Homo sapiens
MLWWEEVEDCYEREDVQKKTFTKWVNAQFSKFGKQHIENLFSDLQDGRRLLDLLEGLTGQKLPKEKGSTRVHALNNVNKALRVLQNNNVDLVNIGSTDIVDGNHKLTLGLIWNIILHWQVKNVMKNIMAGLQQTNSEKILLSWVRQSTRNYPQVNVINFTTSWSDGLALNALIHSHRPDLFDWNSVVCQQSATQRLEHAFNIARYQLGIEKLLDPEDVDTTYPDKKSILMYITSLFQVLPQQVSIEAIQEVEMLPRPPKVTKEEHFQLHHQMHYSQQITVSLAQGYERTSSPKPRFKSYAYTQAAYVTTSDPTRSPFPSQHLEAPEDKSFGSSLMESEVNLDRYQTALEEVLSWLLSAEDTLQAQGEISNDVEVVKDQFHTHEGYMMDLTAHQGRVGNILQLGSKLIGTGKLSEDEETEVQEQMNLLNSRWECLRVASMEKQSNLHRVLMDLQNQKLKELNDWLTKTEERTRKMEEEPLGPDLEDLKRQVQQHKVLQEDLEQEQVRVNSLTHMVVVVDESSGDHATAALEEQLKVLGDRWANICRWTEDRWVLLQDILLKWQRLTEEQCLFSAWLSEKEDAVNKIHTTGFKDQNEMLSSLQKLAVLKADLEKKKQSMGKLYSLKQDLLSTLKNKSVTQKTEAWLDNFARCWDNLVQKLEKSTAQISQAVTTTQPSLTQTTVMETVTTVTTREQILVKHAQEELPPPPPQKKRQITVDSEIRKRLDVDITELHSWITRSEAVLQSPEFAIFRKEGNFSDLKEKVNAIEREKAEKFRKLQDASRSAQALVEQMVNEGVNADSIKQASEQLNSRWIEFCQLLSERLNWLEYQNNIIAFYNQLQQLEQMTTTAENWLKIQPTTPSEPTAIKSQLKICKDEVNRLSDLQPQIERLKIQSIALKEKGQGPMFLDADFVAFTNHFKQVFSDVQAREKELQTIFDTLPPMRYQETMSAIRTWVQQSETKLSIPQLSVTDYEIMEQRLGELQALQSSLQEQQSGLYYLSTTVKEMSKKAPSEISRKYQSEFEEIEGRWKKLSSQLVEHCQKLEEQMNKLRKIQNHIQTLKKWMAEVDVFLKEEWPALGDSEILKKQLKQCRLLVSDIQTIQPSLNSVNEGGQKIKNEAEPEFASRLETELKELNTQWDHMCQQVYARKEALKGGLEKTVSLQKDLSEMHEWMTQAEEEYLERDFEYKTPDELQKAVEEMKRAKEEAQQKEAKVKLLTESVNSVIAQAPPVAQEALKKELETLTTNYQWLCTRLNGKCKTLEEVWACWHELLSYLEKANKWLNEVEFKLKTTENIPGGAEEISEVLDSLENLMRHSEDNPNQIRILAQTLTDGGVMDELINEELETFNSRWRELHEEAVRRQKLLEQSIQSAQETEKSLHLIQESLTFIDKQLAAYIADKVDAAQMPQEAQKIQSDLTSHEISLEEMKKHNQGKEAAQRVLSQIDVAQKKLQDVSMKFRLFQKPANFEQRLQESKMILDEVKMHLPALETKSVEQEVVQSQLNHCVNLYKSLSEVKSEVEMVIKTGRQIVQKKQTENPKELDERVTALKLHYNELGAKVTERKQQLEKCLKLSRKMRKEMNVLTEWLAATDMELTKRSAVEGMPSNLDSEVAWGKATQKEIEKQKVHLKSITEVGEALKTVLGKKETLVEDKLSLLNSNWIAVTSRAEEWLNLLLEYQKHMETFDQNVDHITKWIIQADTLLDESEKKKPQQKEDVLKRLKAELNDIRPKVDSTRDQAANLMANRGDHCRKLVEPQISELNHRFAAISHRIKTGKASIPLKELEQFNSDIQKLLEPLEAEIQQGVNLKEEDFNKDMNEDNEGTVKELLQRGDNLQQRITDERKREEIKIKQQLLQTKHNALKDLRSQRRKKALEISHQWYQYKRQADDLLKCLDDIEKKLASLPEPRDERKIKEIDRELQKKKEELNAVRRQAEGLSEDGAAMAVEPTQIQLSKRWREIESKFAQFRRLNFAQIHTVREETMMVMTEDMPLEISYVPSTYLTEITHVSQALLEVEQLLNAPDLCAKDFEDLFKQEESLKNIKDSLQQSSGRIDIIHSKKTAALQSATPVERVKLQEALSQLDFQWEKVNKMYKDRQGRFDRSVEKWRRFHYDIKIFNQWLTEAEQFLRKTQIPENWEHAKYKWYLKELQDGIGQRQTVVRTLNATGEEIIQQSSKTDASILQEKLGSLNLRWQEVCKQLSDRKKRLEEQKNILSEFQRDLNEFVLWLEEADNIASIPLEPGKEQQLKEKLEQVKLLVEELPLRQGILKQLNETGGPVLVSAPISPEEQDKLENKLKQTNLQWIKVSRALPEKQGEIEAQIKDLGQLEKKLEDLEEQLNHLLLWLSPIRNQLEIYNQPNQEGPFDVKETEIAVQAKQPDVEEILSKGQHLYKEKPATQPVKRKLEDLSSEWKAVNRLLQELRAKQPDLAPGLTTIGASPTQTVTLVTQPVVTKETAISKLEMPSSLMLEVPALADFNRAWTELTDWLSLLDQVIKSQRVMVGDLEDINEMIIKQKATMQDLEQRRPQLEELITAAQNLKNKTSNQEARTIITDRIERIQNQWDEVQEHLQNRRQQLNEMLKDSTQWLEAKEEAEQVLGQARAKLESWKEGPYTVDAIQKKITETKQLAKDLRQWQTNVDVANDLALKLLRDYSADDTRKVHMITENINASWRSIHKRVSEREAALEETHRLLQQFPLDLEKFLAWLTEAETTANVLQDATRKERLLEDSKGVKELMKQWQDLQGEIEAHTDVYHNLDENSQKILRSLEGSDDAVLLQRRLDNMNFKWSELRKKSLNIRSHLEASSDQWKRLHLSLQELLVWLQLKDDELSRQAPIGGDFPAVQKQNDVHRAFKRELKTKEPVIMSTLETVRIFLTEQPLEGLEKLYQEPRELPPEERAQNVTRLLRKQAEEVNTEWEKLNLHSADWQRKIDETLERLQELQEATDELDLKLRQAEVIKGSWQPVGDLLIDSLQDHLEKVKALRGEIAPLKENVSHVNDLARQLTTLGIQLSPYNLSTLEDLNTRWKLLQVAVEDRVRQLHEAHRDFGPASQHFLSTSVQGPWERAISPNKVPYYINHETQTTCWDHPKMTELYQSLADLNNVRFSAYRTAMKLRRLQKALCLDLLSLSAACDALDQHNLKQNDQPMDILQIINCLTTIYDRLEQEHNNLVNVPLCVDMCLNWLLNVYDTGRTGRIRVLSFKTGIISLCKAHLEDKYRYLFKQVASSTGFCDQRRLGLLLHDSIQIPRQLGEVASFGGSNIEPSVRSCFQFANNKPEIEAALFLDWMRLEPQSMVWLPVLHRVAAAETAKHQAKCNICKECPIIGFRYRSLKHFNYDICQSCFFSGRVAKGHKMHYPMVEYCTPTTSGEDVRDFAKVLKNKFRTKRYFAKHPRMGYLPVQTVLEGDNMETPVTLINFWPVDSAPASSPQLSHDDTHSRIEHYASRLAEMENSNGSYLNDSISPNESIDDEHLLIQHYCQSLNQDSPLSQPRSPAQILISLESEERGELERILADLEEENRNLQAEYDRLKQQHEHKGLSPLPSPPEMMPTSPQSPRDAELIAEAKLLRQHKGRLEARMQILEDHNKQLESQLHRLRQLLEQPQAEAKVNGTTVSSPSTSLQRSDSSQPMLLRVVGSQTSDSMGEEDLLSPPQDTSTGLEEVMEQLNNSFPSSRGRNTPGKPMREDTM

SEQ ID NO: 303 - protein, 1152 aa, Homo sapiens
MREPEELMPDSGAVFTFGKSKFAENNPGKFWFKNDVPVHLSCGDEHSAVVTGNNKLYMFGSNNWGQLGLGSKSAISKPTCVKALKPEKVKLAACGRNHTLVSTEGGNVYATGGNNEGQLGLGDTEERNTFHVISFFTSEHKIKQLSAGSNTSAALTEDGRLFMWGDNSEGQIGLKNVSNVCVPQQVTIGKPVSWISCGYYHSAFVTTDGELYVFGEPENGKLGLPNQLLGNHRTPQLVSEIPEKVIQVACGGEHTVVLTENAVYTFGLGQFGQLGLGTFLFETSEPKVIENIRDQTISYISCGENHTALITDIGLMYTFGDGRHGKLGLGLENFTNHFIPTLCSNFLRFIVKLVACGGCHMVVFAAPHRGVAKEIEFDEINDTCLSVATFLPYSSLTSGNVLQRTLSARMRRRERERSPDSFSMRRTLPPIEGTLGLSACFLPNSVFPRCSERNLQESVLSEQDLMQPEEPDYLLDEMTKEAEIDNSSTVESLGETTDILNMTHIMSLNSNEKSLKLSPVQKQKKQQTIGELTQDTALTENDDSDEYEEMSEMKEGKACKQHVSQGIFMTQPATTIEAFSDEEVEIPEEKEGAEDSKGNGIEEQEVEANEENVKVHGGRKEKTEILSDDLTDKAEVSEGKAKSVGEAEDGPEGRGDGTCEEGSSGAEHWQDEEREKGEKDKGRGEMERPGEGEKELAEKEEWKKRDGEEQEQKEREQGHQKERNQEMEEGGEEEHGEGEEEEGDREEEEEKEGEGKEEGEGEEVEGEREKEEGERKKEERAGKEEKGEEEGDQGEGEEEETEGRGEEKEEGGEVEGGEVEEGKGEREEEEEEGEGEEEEGEGEEEEGEGEEEEGEGKGEEEGEEGEGEEEGEEGEGEGEEEEGEGEGEEEGEGEGEEEEGEGEGEEEGEGEGEEEEGEGKGEEEGEEGEGEGEEEEGEGEGEDGEGEGEEEEGEWEGEEEEGEGEGEEEGEGEGEEGEGEGEEEEGEGEGEEEEGEEEGEEEGEGEEEGEGEGEEEEEGEVEGEVEGEEGEGEGEEEEGEEEGEEREKEGEGEENRRNREEEEEEEGKYQETGEEENERQDGEEYKKVSKIKGSVKYGKHKTYQKKSVTNTQGNGKEQRSKMPVQSKRLLKNGPSGSKKFWNNVLPHYLELK

SEQ ID NO: 304 - protein, 476 aa, Homo sapiens
MLVLLLHAVVLGLPSAWAVGACARACPAACACSTVERGCSVRCDRAGLLRVPAELPCEAVSIDLDRNGLRFLGERAFGTLPSLRRLSLRHNNLSFITPGAFKGLPRLAELRLAHNGDLRYLHARTFAALSRLRRLDLAACRLFSVPERLLAELPALRELAAFDNLFRRVPGALRGLANLTHAHLERGRIEAVASSSLQGLRRLRSLSLQANRVRAVHAGAFGDCGVLEHLLLNDNLLAELPADAFRGLRRLRTLNLGGNALDRVARAWFADLAELELLYLDRNSIAFVEEGAFQNLSGLLALHLNGNRLTVLAWVAFQPGFFLGRLFLFRNPWCCDCRLEWLRDWMEGSGRVTDVPCASPGSVAGLDLSQVTFGRSSDGLCVDPEELNLTTSSPGPSPEPAATTVSRFSSLLSKLLAPRVPVEEAANTTGGLANASLSDSLSSRGVGGAGRQPWFLLASCLLPSVAQHVVFGLQMD

SEQ ID NO: 305 - protein, 493 aa, Homo sapiens
MAAATGPSFWLGNETLKVPLALFALNRQRLCERLRKNPAVQAGSIVVLQGGEETQRYCTDTGVLFRQESFFHWAFGVTEPGCYGVIDVDTGKSTLFVPRLPASHATWMGKIHSKEHFKEKYAVDDVQYVDEIASVLTSQKPSVLLTLRGVNTDSGSVCREASFDGISKFEVNNTILHPEIVECRVFKTDMELEVLRYTNKISSEAHREVMKAVKVGMKEYELESLFEHYCYSRGGMRHSSYTCICGSGENSAVLHYGHAGAPNDRTIQNGDMCLFDMGGEYYCFASDITCSFPANGKFTADQKAVYEAVLRSSRAVMGAMKPGVWWPDMHRLADRIHLEELAHMGILSGSVDAMVQAHLGAVFMPHGLGHFLGIDVHDVGGYPEGVERIDEPGLRSLRTARHLQPGMVLTVEPGIYFIDHLLDEALADPARASFLNREVLQRFRGFGGVRIEEDVVVTDSGIELLTCVPRTVEEIEACMAGCDKAFTPFSGPK

SEQ ID NO: 306 - protein, 133 aa, Homo sapiens
MRKHVLAASFSMLSLLVIMGDTDSKTDSSFIMDSDPRRCMRHHYVDSISHPLYKCSSKMVLLARCEGHCSQASRSEPLVSFSTVLKQPFRSSCHCCRPQTSKLKALRLRCSGGMRLTATYRYILSCHCEECNS

SEQ ID NO: 307 - protein, 1977 aa, Homo sapiens
MSESEGGKDTTPEPSPANGAGPGPEWGLCPGPPAVEGESSGASGLGTPKRRNQHSKHKTVAVASAQRSPRALFCLTLANPLRRSCISIVEWKPFDILILLTIFANCVALGVYIPFPEDDSNTANHNLEQVEYVFLVIFTVETVLKIVAYGLVLHPSAYIRNGWNLLDFIIVVVGLFSVLLEQGPGRPGDAPHTGGKPGGFDVKALRAFRVLRPLRLVSGVPSLHIVLNSIMKALVPLLHIALLVLFVIIIYAIIGLELFLGRMHKTCYFLGSDMEAEEDPSPCASSGSGRACTLNQTECRGRWPGPNGGITNFDNFFFAMLTVFQCVTMEGWTDVLYWMQDAMGYELPWVYFVSLVIFGSFFVLNLVLGVLSGEFSKEREKAKARGDFQKQREKQQMEEDLRGYLDWITQAEELDMEDPSADDNLGSMAEEGRAGHRPQLAELTNRRRGRLRWFSHSTRSTHSTSSHASLPASDTGSMTETQGDEDEEEGALASCTRCLNKIMKTRVCRRLRRANRVLRARCRRAVKSNACYWAVLLLVFLNTLTIASEHHGQPVWLTQIQEYANKVLLCLFTVEMLLKLYGLGPSAYVSSFFNRFDCFVVCGGILETTLVEVGAMQPLGISVLRCVRLLRIFKVTRHWASLSNLVASLLNSMKSIASLLLLLFLFIIIFSLLGMQLFGGKFNFDQTHTKRSTFDTFPQALLTVFQILTGEDWNVVMYDGIMAYGGPFFPGMLVCIYFIILFICGNYILLNVFLAIAVDNLASGDAGTAKDKGGEKSNEKDLPQENEGLVPGVEKEEEEGARREGADMEEEEEEEEEEEEEEEEEGAGGVELLQEVVPKEKVVPIPEGSAFFCLSQTNPLRKGCHTLIHHHVFTNLILVFIILSSVSLAAEDPIRAHSFRNHILGYFDYAFTSIFTVEILLKMTVFGAFLHRGSFCRSWFNMLDLLVVSVSLISFGIHSSAISVVKILRVLRVLRPLRAINRAKGLKHVVQCVFVAIRTIGNIMIVTTLLQFMFACIGVQLFKGKFYTCTDEAKHTPQECKGSFLVYPDGDVSRPLVRERLWVNSDFNFDNVLSAMMALFTVSTFEGWPALLYKAIDAYAEDHGPIYNYRVEISVFFIVYIIIIAFFMMNIFVGFVIITFRAQGEQEYQNCELDKNQRQCVEYALKAQPLRRYIPKNPHQYRVWATVNSAAFEYLMFLLILLNTVALAMQHYEQTAPFNYAMDILNMVFTGLFTIEMVLKIIAFKPKHYFTDAWNTFDALIVVGSIVDIAVTEVNNGGHLGESSEDSSRISITFFRLFRVMRLVKLLSKGEGIRTLLWTFIKSFQALPYVALLIAMIFFIYAVIGMQMFGKVALQDGTQINRNNNFQTFPQAVLLLFRCATGEAWQEIMLASLPGNRCDPESDFGPGEEFTCGSNFAIAYFISFFMLCAFLIINLFVAVIMDNFDYLTRDWSILGPHHLDEFKRIWSEYDPGAKGRIKHLDVVALLRRIQPPLGFGKLCPHRVACKRLVAMNMPLNSDGTVTFNATLFALVRTSLKIKTEGNLEQANQELRIVIKKIWKRMKQKLLDEVIPPPDEEEVTVGKFYATFLIQDYFRKFRRRKEKGLLGNDAAPSTSSALQAGLRSLQDLGPEMRQALTCDTEEEEEEGQEGVEEEDEKDLETNKATMVSQPSARRGSGISVSLPVGDRLPDSLSFGPSDDDRGTPTSSQPSVPQAGSNTHRRGSGALIFTIPEEGNSQPKGTKGQNKQDEDEEVPDRLSYLDEQAGTPPCSVLLPPHRAQRYMDGHLVPRRRLLPPTPAGRKPSFTIQCLQRQGSCEDLPIPGTYHRGRNSGPNRAQGSWATPPQRGRLLYAPLLLVEEGAAGEGYLGRSSGPLRTFTCLHVPGTHSDPSHGKRGSADSLVEAVLISEGLGLFARDPRFVALAKQEIADACRLTLDEMDNAASDLLAQGTSSLYSDEESILSRFDEEDLGDEMACVHAL

SEQ ID NO: 308 - protein, 417 aa, Homo sapiens
MSLSNKLTLDKLDVKGKRVVMRVDFNVPMKNNQITNNQRIKAAVPSIKFCLDNGAKSVVLMSHLGRPDGVPMPDKYSLEPVAVELKSLLGKDVLFLKDCVGPEVEKACANPAAGSVILLENLRFHVEEEGKGKDASGNKVKAEPAKIEAFRASLSKLGDVYVNDAFGTAHRAHSSMVGVNLPQKAGGFLMKKELNYFAKALESPERPFLAILGGAKVADKIQLINNMLDKVNEMIIGGGMAFTFLKVLNNMEIGTSLFDEEGAKIVKDLMSKAEKNGVKITLPVDFVTADKFDENAKTGQATVASGIPAGWMGLDCGPESSKKYAEAVTRAKQIVWNGPVGVFEWEAFARGTKALMDEVVKATSRGCITIIGGGDTATCCAKWNTEDKVSHVSTGGGASLELLEGKVLPGVDALSNI

SEQ ID NO: 309 - protein, 653 aa, Homo sapiens
MADTLPSEFDVIVIGTGLPESIIAAACSRSGRRVLHVDSRSYYGGNWASFSFSGLLSWLKEYQENSDIVSDSPVWQDQILENEEAIALSRKDKTIQHVEVFCYASQDLHEDVEEAGALQKNHALVTSANSTEAADSAFLPTEDESLSTMSCEMLTEQTPSSDPENALEVNGAEVTGEKENHCDDKTCVPSTSAEDMSENVPIAEDTTEQPKKNRITYSQIIKEGRRFNIDLVSKLLYSRGLLIDLLIKSNVSRYAEFKNITRILAFREGRVEQVPCSRADVFNSKQLTMVEKRMLMKFLTFCMEYEKYPDEYKGYEEITFYEYLKTQKLTPNLQYIVMHSIAMTSETASSTIDGLKATKNFLHCLGRYGNTPFLFPLYGQGELPQCFCRMCAVFGGIYCLRHSVQCLVVDKESRKCKAIIDQFGQRIISEHFLVEDSYFPENMCSRVQYRQISRAVLITDRSVLKTDSDQQISILTVPAEEPGTFAVRVIELCSSTMTCMKGTYLVHLTCTSSKTAREDLESVVQKLFVPYTEMEIENEQVEKPRILWALYFNMRDSSDISRSCYNDLPSNVYVCSGPDCGLGNDNAVKQAETLFQEICPNEDFCPPPPNPEDIILDGDSLQPEASESSAIPEANSETFKESTNLGNLEESSE

SEQ ID NO: 310 - protein, 97 aa, Homo sapiens
MDSSSSSSAAGLGAVDPQLQHFIEVETQKQRFQQLVHQMTELCWEKCMDKPGPKLDSRAEACFVNCVERFIDTSQFILNRLEQTQKSKPVFSESLSD

SEQ ID NO: 311 - protein, 318 aa, Homo sapiens
MPNIKIFSGSSHQDLSQKIADRLGLELGKVVTKKFSNQETCVEIGESVRGEDVYIVQSGCGEINDNLMELLIMINACKIASASRVTAVIPCFPYARQDKKDKSRAPISAKLVANMLSVAGADHIITMDLHASQIQGFFDIPVDNLYAEPAVLKWIRENISEWRNCTIVSPDAGGAKRVTSIADRLNVDFALIHKERKKANEVDRMVLVGDVKDRVAILVDDMADTCGTICHAADKLLSAGATRVYAILTHGIFSGPAISRINNACFEAVVVTNTIPQEDKMKHCSKIQVIDISMILAEAIRRTHNGESVSYLFSHVPL

SEQ ID NO: 312 - protein, 364 aa, Homo sapiens
MAQQWSLQRLAGRHPQDSYEDSTQSSIFTYTNSNSTRGPFEGPNYHIAPRWVYHLTSVWMIFVVTASVFTNGLVLAATMKFKKLRHPLNWILVNLAVADLAETVIASTISIVNQVSGYFVLGHPMCVLEGYTVSLCGITGLWSLAIISWERWMVVCKPFGNVRFDAKLAIVGIAFSWIWAAVWTAPPIFGWSRYWPHGLKTSCGPDVFSGSSYPGVQSYMIVLMVTCCIIPLAIIMLCYLQVWLAIRAVAKQQKESESTQKAEKEVTRMVVVMIFAYCVCWGPYTFFACFAAANPGYAFHPLMAALPAYFAKSATIYNPVIYVFMNRQFRNCILQLFGKKVDDGSELSSASKTEVSSVSSVSPA

SEQ ID NO: 313 - protein, 364 aa, Homo sapiens
MAQQWSLQRLAGRHPQDSYEDSTQSSIFTYTNSNSTRGPFEGPNYHIAPRWVYHLTSVWMIFVVIASVFTNGLVLAATMKFKKLRHPLNWILVNLAVADLAETVIASTISVVNQVYGYFVLGHPMCVLEGYTVSLCGITGLWSLAIISWERWMVVCKPFGNVRFDAKLAIVGIAFSWIWAAVWTAPPIFGWSRYWPHGLKTSCGPDVFSGSSYPGVQSYMIVLMVTCCITPLSIIVLCYLQVWLAIRAVAKQQKESESTQKAEKEVTRMVVVMVLAFCFCWGPYAFFACFAAANPGYPFHPLMAALPAFFAKSATIYNPVIYVFMNRQFRNCILQLFGKKVDDGSELSSASKTEVSSVSSVSPA

SEQ ID NO: 314 - protein, 345 aa, Homo sapiens; identical to SEQ ID NO: 145

SEQ ID NO: 315 - protein, 246 aa, Homo sapiens
MAFLRSMWGVLSALGRSGAELCTGCGSRLRSPFSFVYLPRWFSSVLASCPKKPVSSYLRFSKEQLPIFKAQNPDAKTTELIRRIAQRWRELPDSKKKIYQDAYRAEWQVYKEEISRFKEQLTPSQIMSLEKEIMDKHLKRKAMTKKKELTLLGKPKRPRSAYNVYVAERFQEAKGDSPQEKLKTVKENWKNLSDSEKELYIQHAKEDETRYHNEMKSWEEQMIEVGRKDLLRRTIKKQRKYGAEEC

SEQ ID NO: 316 - protein, 318 aa, Homo sapiens
MPMANLLLLIVPILIAMAFLMLTERKILGYMQLRKGPNVVGPYGLLQPFADAMKLFTKEPLKPATSTITLYITAPTLALTIALLLWTPLPMPNPLVNLNLGLLFILATSSLAVYSILWSGWASNSNYALIGALRAVAQTISYEVTLAIILLSTLLMSGSFNLSTLITTQEHLWLLLPSWPLAMMWFISTLAETNRTPFDLAEGESELVSGFNIEYAAGPFALFFMAEYTNIIMMNTLTTTIFLGTTYDALSPELYTTYFVTKTLLLTSLFLWIRTAYPRFRYDQLMHLLWKNFLPLTLALLMWYVSMPITISSIPPQT

SEQ ID NO: 317 - protein, 347 aa, Homo sapiens
MNPLAQPVIYSTIFAGTLITALSSHWFFTWVGLEMNMLAFIPVLTKKMNPRSTEAAIKYFLTQATASMILLMAILFNNMLSGQWTMTNTTNQYSSLMIMMAMAMKLGMAPFHFWVPEVTQGTPLTSGLLLLTWQKLAPISIMYQISPSLNVSLLLTLSILSIMAGSWGGLNQTQLRKILAYSSITHMGWMMAVLPYNPNMTILNLTIYIILTTTAFLLLNLNSSTTTLLLSRTWNKLTWLTPLIPSTLLSLGGLPPLTGFLPKWAIIEEFTKNNSLIIPTIMATITLLNLYFYLRLIYSTSITLLPMSNNVKMKWQFEHTKPTPFLPTLIALTTLLLPISPFMLMIL

SEQ ID NO: 318 - protein, 115 aa, Homo sapiens
MNFALILMINTLLALLLMIITFWLPQLNGYMEKSTPYECGFDPMSPARVPFSMKFFLVAITFLLFDLEIALLLPLPWALQTTNLPLMVMSSLLLIIILALSLAYEWLQKGLDWTE

SEQ ID NO: 319 - protein, 98 aa, Homo sapiens
MPLIYMNIMLAFTISLLGMLVYRSHLMSSLLCLEGMMLSLFIMATLMTLNTHSLLANIVPIAMLVFAACEAAVGLALLVSISNTYGLDYVHNLNLLQC

SEQ ID NO: 320 - protein, 459 aa, Homo sapiens
MLKLIVPTIMLLPLTWLSKKHMIWINTTTHSLIISIIPLLFFNQINNNLFSCSPTFSSDPLTTPLLMLTTWLLPLTIMASQRHLSSEPLSRKKLYLSMLISLQISLIMTFTATELIMFYIFFETTLIPTLAIITRWGNQPERLNAGTYFLFYTLVGSLPLLIALIYTHNTLGSLNILLLTLTAQELSNSWANNLMWLAYTMAFMVKMPLYGLHLWLPKAHVEAPIAGSMVLAAVLLKLGGYGMMRLTLILNPLTKHMAYPFLVLSLWGMIMTSSICLRQTDLKSLIAYSSISHMALVVTAILIQTPWSFTGAVILMIAHGLTSSLLFCLANSNYERTHSRIMILSQGLQTLLPLMAFWWLLASLANLALPPTINLLGELSVLVTTFSWSNITLLLTGLNMLVTALYSLYMFTTTQWGSLTHHINNMKPSFTRENTLMFMHLSPILLLSLNPDIITGFSS

SEQ ID NO: 321 - protein, 603 aa, Homo sapiens
MTMHTTMTTLTLTSLIPPILTTLVNPNKKNSYPHYVKSIVASTFIISLFPTTMFMCLDQEVIISNWHWATTQTTQLSLSFKLDYFSMMFIPVALFVTWSIMEFSLWYMNSDPNINQFFKYLLIFLITMLILVTANNLFQLFIGWEGVGIMSFLLISWWYARADANTAAIQAILYNRIGDIGFILALAWFILHSNSWDPQQMALLNANPSLTPLLGLLLAAAGKSAQLGLHPWLPSAMEGPTPVSALLHSSTMVVAGIFLLIRFHPLAENSPLIQTLTLCLGAITTLFAAVCALTQNDIKKIVAFSTSSQLGLMMVTIGINQPHLAFLHICTHAFFKAMLFMCSGSIIHNLNNEQDIRKMGGLLKTMPLTSTSLTIGSLALAGMPFLTGFYSKDHIIETANMSYTNAWALSITLIATSLTSAYSTRMILLTLTGQPRFPTLTNINENNPTLLNPIKRLAAGSLFAGFLITNNISPASPFQTTIPLYLKLTALAVTFLGLLTALDLNYLTNKLKMKSPLCTFYFSNMLGFYPSITHRTIPYLGLLTSQNLPLLLLDLTWLEKLLPKTISQHQISTSIITSTQKGMIKLYFLSFFFPLILTLLLIT

SEQ ID NO: 322 - protein, 174 aa, Homo sapiens
MMYALFLLSVGLVMGFVGFSSKPSPIYGGLVLIVSGVVGCVIILNFGGGYMGLMVFLIYLGGMMVVFGYTTAMAIEEYPEAWGSGVEVLVSVLVGLAMEVGLVLWVKEYDGVVVVVNFNSVGSWMIYEGEGSGLIREDPIGAGALYDYGRWLVVVTGWTLFVGVYIVIEIARGN

SEQ ID NO: 323 - protein, 226 aa, Homo sapiens
MNENLFASFIAPTILGLPAAVLIILFPPLLIPTSKYLINNRLITTQQWLIKLTSKQMMTMHNTKGRTWSLMLVSLIIFIATTNLLGLLPHSFTPTTQLSMNLAMAIPLWAGTVIMGFRSKIKNALAHFLPQGTPTPLIPMLVIIETISLLIQPMALAVRLTANITAGHLLMHLIGSATLAMSTINLPSTLIIFTILILLTILEIAVALIQAYVFTLLVSLYLHDNT

SEQ ID NO: 324 - protein, 68 aa, Homo sapiens
MPQLNTTVWPTMITPMLLTLFLITQLKMLNTNYHLPPSPKPMKMKNYNKPWEPKWTKICSLHSLPPQS

SEQ ID NO: 325 - protein, 513 aa, Homo sapiens
MFADRWLFSTNHKDIGTLYLLFGAWAGVLGTALSLLIRAELGQPGNLLGNDHIYNVIVTAHAFVMIFFMVMPIMIGGFGNWLVPLMIGAPDMAFPRMNNMSFWLLPPSLLLLLASAMVEAGAGTGWTVYPPLAGNYSHPGASVDLTIFSLHLAGVSSILGAINFITTIINMKPPAMTQYQTPLFVWSVLITAVLLLLSLPVLAAGITMLLTDRNLNTTFFDPAGGGDPILYQHLFWFFGHPEVYILILPGFGMISHIVTYYSGKKEPFGYMGMVWAMMSIGFLGFIVWAHHMFTVGMDVDTRAYFTSATMIIAIPTGVKVFSWLATLHGSNMKWSAAVLWALGFIFLFTVGGLTGIVLANSSLDIVLHDTYYVVAHFHYVLSMGAVFAIMGGFIHWFPLFSGYTLDQTYAKIHFTIMFIGVNLTFFPQHFLGLSGMPRRYSDYPDAYTTWNILSSVGSFISLTAVMLMIFMIWEAFASKRKVLMVEEPSMNLEWLYGCPPPYHTFEEPVYMKS

SEQ ID NO: 326 - protein, 261 aa, Homo sapiens
MTHQSHAYHMVKPSPWPLTGALSALLMTSGLAMWFHFHSMTLLMLGLLTNTLTMYQWWRDVTRESTYQGHHTPPVQKGLRYGMILFITSEVFFFAGFFWAFYHSSLAPTPQLGGHWPPTGITPLNPLEVPLLNTSVLLASGVSITWAHHSLMENNRNQMIQALLITILLGLYFTLLQASEYFESPFTISDGIYGSTFFVATGFHGLHVIIGSTFLTICFIRQLMFHFTSKHHFGFEAAAWYWHFVDVVWLFLYVSIYWWGS

SEQ ID NO: 327 - protein, 380 aa, Homo sapiens
MTPMRKTNPLMKLINHSFIDLPTPSNISAWWNFGSLLGACLILQITTGLFLAMHYSPDASTAFSSIAHITRDVNYGWIIRYLHANGASMFFICLFLHIGRGLYYGSFLYSETWNIGIILLLATMATAFMGYVLPWGQMSFWGATVITNLLSAIPYIGTDLVQWIWGGYSVDSPTLTRFFTFHFILPFIIAALATLHLLFLHETGSNNPLGITSHSDKITFHPYYTIKDALGLLLFLLSLMTLTLFSPDLLGDPDNYTLANPLNTPPHIKPEWYFLFAYTILRSVPNKLGGVLALLLSILILAMIPILHMSKQQSMMFRPLSQSLYWLLAADLLILTWIGGQPVSYPFTIIGQVASVLYFTTILILMPTISLIENKMLKWA

SEQ ID NO: 328 - protein, 903 aa, Homo sapiens
MASVWQRLGFYASLLKRQLNGGPDVIKWERRVIPGCTRSIYSATGKWTKEYTLQTRKDVEKWWHQRIKEQASKISEADKSKPKFYVLSMFPYPSGKLHMGHVRVYTISDTIARFQKMRGMQVINPMGWDAFGLPAENAAVERNLHPQSWTQSNIKHMRKQLDRLGLCFSWDREITTCLPDYYKWTQYLFIKLYEAGLAYQKEALVNWDPVDQTVLANEQVDEHGCSWRSGAKVEQKYLRQWFIKTTAYAKAMQDALADLPEWYGIKGMQAHWIGDCVGCHLDFTLKVHGQATGEKLTAYTATPEAIYGTSHVAISPSHRLLHGHSSLKEALRMALVPGKDCLTPVMAVNMLTQQEVPVVILAKADLEGSLDSKIGIPSTSSEDTILAQTLGLAYSEVIETLPDGTERLSSSAEFTGMTRQDAFLALTQKARGKRVGGDVTSDKLKDWLISRQRYWGTPIPIVHCPVCGPTPVPLEDLPVTLPNIASFTGKGGPPLAMASEWVNCSCPRCKGAAKRETDTMDTFVDSAWYYFRYTDPHNPHSPFNTAVADYWMPVDLYIGGKEHAVMHLFYARFFSHFCHDQKMVKHREPFHKLLAQGLIKGQTFRLPSGQYLQREEVDLTGSVPVHAKTKEKLEVTWEKMSKSKHNGVDPEEVVEQYGIDTIRLYILFAAPPEKDILWDVKTDALPGVLRWQQRLWTLTTRFIEARASGKSPQPQLLSNKEKAEARKLWEYKNSVISQVTTHFTEDFSLNSAISQLMGLSNALSQASQSVILHSPEFEDALCALMVMAAPLAPHVTSEIWAGLALVPRKLCAHYTWDASVLLQAWPAVDPEFLQQPEVVQMAVLINNKACGKIPVPQQVARDQDKVHEFVLQSELGVRLLQGRSIKKSFLSPRTALINFLVQD

SEQ ID NO: 329 - protein, 523 aa, Homo sapiens
MAALLRRLLQRERPSAASGRPVGRREANLGTDAGVAVRVRFAPSPTGFLHLGGLRTALYNYIFAKKYQGSFILRLEDTDQTRVVPGAAENIEDMLEWAGIPPDESPRRGGPAGPYQQSQRLELYAQATEALLKTGAAYPCFCSPQRLELLKKEALRNHQTPRYDNRCRNMSQEQVAQKLAKDPKPAIRFRLEQVVPAFQDLVYGWNRHEVASVEGDPVIMKSDGFPTYHLACVVDDHHMGISHVLRGSEWLVSTAKHLLLYQALGWQPPHFAHLPLLLNRDGSKLSKRQGDVFLEHFAADGFLPDSLLDIITNCGSGFAENQMGRTLPELITQFNLTQVTCHSALLDLEKLPEFNRLHLQRLVSNESQRRQLVGKLQVLVEEAFGCQLQNRDVLNPVYVERILLLRQGHICRLQDLVSPVYSYLWTRPAVGRAQLDAISEKVDVIAKRVLGLLERSSMSLTQDMLNGELKKLSEGLEGTKYSNVMKLLRMALSGQQQGPPVAEMMLALGPKEVRERIQKVVSS

SEQ ID NO: 330 - protein, 597 aa, Homo sapiens
MAAVQAAEVKVDGSEPKLSKNELKRRLKAEKKVAEKEAKQKELSEKQLSQATAAATNHTTDNGVGPEEESVDPNQYYKIRSQAIHQLKVNGEDPYPHKFHVDISLTDFIQKYSHLQPGDHLTDITLKVAGRIHAKRASGGKLIFYDLRGEGVKLQVMANSRNYKSEEEFIHINNKLRRGDIIGVQGNPGKTKKGELSIIPYEITLLSPCLHMLPHLHFGLKDKETRYRQRYLDLILNDFVRQKFIIRSKIITYIRSFLDELGFLEIETPMMNIIPGGAVAKPFITYHNELDMNLYMRIAPELYHKMLVVGGIDRVYEIGRQFRNEGIDLTHNPEFTTCEFYMAYADYHDLMEITEKMVSGMVKHITGSYKVTYHPDGPEGQAYDVDFTPPFRRINMVEELEKALGMKLPETNLFETEETRKILDDICVAKAVECPPPRTTARLLDKLVGEFLEVTCINPTFICDHPQIMSPLAKWHRSKEGLTERFELFVMKKEICNAYTELNDPMRQRQLFEEQAKAKAAGDDEAMFIDENFCTALEYGLPPTAGWGMGIDRVAMFLTDSNNIKEVLLFPAMKPEDKKENVATTDTLESTTVGTSV

SEQ ID NO: 331 - protein, 506 aa, Homo sapiens
MPLLGLLPRRAWASLLSQLLRPPCASCTGAVRCQSQVAEAVLTSQLKAHQEKPNFIIKTPKGTRDLSPQHMVVREKILDLVISCFKRHGAKGMDTPAFELKETLTEKYGEDSGLMYDLKDQGGELLSLRYDLTVPFARYLAMNKVKKMKRYHVGKVWRRESPTIVQGRYREFCQCDFDIAGQFDPMIPDAECLKIMCEILSGLQLGDFLIKVNDRRIVDGMFAVCGVPESKFRAICSSIDKLDKMAWKDVRHEMVVKKGLAPEVADRIGDYVQCHGGVSLVEQMFQDPRLSQNKQALEGLGDLKLLFEYLTLFGIADKISFDLSLARGLDYYTGVIYEAVLLQTPTQAGEEPLNVGSVAAGGRYDGLVGMFDPKGHKVPCVGLSIGVERIFYIVEQRMKTKGEKVRTTETQVFVATPQKNFLQERLKLIAELWDSGIKAEMLYKNNPKLLTQLHYCESTGIPLVVIIGEQELKEGVIKIRSVASREEVAIKRENFVAEIQKRLSES

SEQ ID NO: 332 - protein, 518 aa, Homo sapiens
MAASMARRLWPLLTRRGFRPRGGCISNDSPRRSFTTEKRNRNLLYEYAREGYSALPQLDIERFCACPEEAAHALELRKGELRSADLPAIISTWQELRQLQEQIRSLEEEKAAVTEAVRALLANQDSGEVQQDPKYQGLRARGREIRKELVHLYPREAQLEEQFYLQALKLPNQTHPDVPVGDESQARVLHMVGDKPVFSFQPRGHLEIGEKLDIIRQKRLSHVSGHRSYYLRGAGALLQHGLVNFTFNKLLRRGFTPMTVPDLLRGAVFEGCGMTPNANPSQIYNIDPARFKDLNLAGTAEVGLAGYFMDHTVAFRDLPVRMVCSSTCYRAETNTGQEPRGLYRVHHFTKVEMFGVTGPGLEQSSQLLEEFLSLQMEILTELGLHFRVLDMPTQELGLPAYRKFDIEAWMPGRGRFGEVTSASNCTDFQSRRLHIMFQTEAGELQFAHTVNATACAVPRLLIALLESNQQKDGSVLVPPALQSYLGTDRITAPTHVPLQYIGPNQPRKPGLPGQPAVS

SEQ ID NO: 333 - protein, 475 aa, Homo sapiens
MEGLLTRCRALPALATCSRQLSGYVPCRFHHCAPRRGRRLLLSRVFQPQNLREDRVLSLQDKSDDLTCKSQRLMLQVGLIYPASPGCYHLLPYTVRAMEKLVRVIDQEMQAIGGQKVNMPSLSPAELWQATNRWDLMGKELLRLRDRHGKEYCLGPTHEEAITALIASQKKLSYKQLPFLLYQVTRKFRDEPRPRFGLLRGREFYMKDMYTFDSSPEAAQQTYSLVCDAYCSLFNKLGLPFVKVQADVGTIGGTVSHEFQLPVDIGEDRLAICPRCSFSANMETLDLSQMNCPACQGPLTKTKGIEVGHTFYLGTKYSSIFNAQFTNVCGKPTLAEMGCYGLGVTRILAAAIEVLSTEDCVRWPSLLAPYQACLIPPKKGSKEQAASELIGQLYDHITEAVPQLHGEVLLDDRTHLTIGNRLKDANKFGYPFVIIAGKRALEDPAHFEVWCQNTGEVAFLTKDGVMDLLTPVQTV

SEQ ID NO: 334 - protein, 282 aa, Homo sapiens
MEPKVAELKQKIEDTLCPFGFEVYPFQVAWYNELLPPAFHLPLPGPTLAFLVLSTPAMFDRALKPFLQSCHLRMLTDPVDQCVAYHLGRVRESLPELQIEIIADYEVHPNRRPKILAQTAAHVAGAAYYYQRQDVEADPWGNQRISGVCIHPRFGGWFAIRGVVLLPGIEVPDLPPRKPHDCVPTRADRIALLEGFNFHWRDWTYRDAVTPQERYSEEQKAYFSTPPAQRLALLGLAQPSEKPSSPSPDLPFTTPAPKKPGNPSRARSWLSPRVSPPASPGP

SEQ ID NO: 335 - protein, 361 aa, Homo sapiens
MATAASNPYSILSSTSLVHADSAGMQQGSPFRNPQKLLQSDYLQGVPSNGHPLGHHWVTSLSDGGPWSSTLATSPLDQQDVKPGREDLQLGAIIHHRSPHVAHHSPHTNHPNAWGASPAPNPSITSSGQPLNVYSQPGFTVSGMLEHGGLTPPPAAASAQSLHPVLREPPDHGELGSHHCQDHSDEETPTSDELEQFAKQFKQRRIKLGFTQADVGLALGTLYGNVFSQTTICRFEGLQLSFKNMCKLKPLLNKWLEEADSSTGSPTSIDKIAAQGRKRKKRTSIEVSVKGVLETHFLKCPKPAAQEISSLADSLQLEKEVVRVWFCNRRQKEKRMTPPGDQQPHEVYSHTVKTDTSCHDL

SEQ ID NO: 336 - protein, 745 aa, Homo sapiens
MLPFAPQDEPWDREMEVFSGGGASSGEVNGLKMVDEPMEEGEADSCHDEGVVKEIPITHHVKEGYEKADPAQFELLKVLGQGSFGKVFLVRKKTGPDAGQLYAMKVLKKASLKVRDRVRTKMERDILVEVNHPFIVKLHYAFQTEGKLYLILDFLRGGDVFTRLSKEVLFTEEDVKFYLAELALALDHLHQLGIVYRDLKPENILLDEIGHIKLTDFGLSKESVDQEKKAYSFCGTVEYMAPEVVNRRGHSQSADWWSYGVLMFEMLTGTLPFQGKDRNETMNMILKAKLGMPQFLSAEAQSLLRMLFKRNPANRLGSEGVEEIKRHLFFANIDWDKLYKREVQPPFKPASGKPDDTFCFDPEFTAKTPKDSPGLPASANAHQLFKGFSFVATSIAEEYKITPITSANVLPIVQINGNAAQFGEVYELKEDIGVGSYSVCKRCIHATTNMEFAVKIIDKSKRDPSEEIEILMRYGQHPNIITLKDVFDDGRYVYLVTDLMKGGELLDRILKQKCFSEREASDILYVISKTVDYLHCQGVVHRDLKPSNILYMDESASADSIRICDFGFAKQLRGENGLLLTPCYTANFVAPEVLMQQGYDAACDIWSLGVLFYTMLAGYTPFANGPNDTPEEILLRIGNGKFSLSGGNWDNISDGAKDLLSHMLHMDPHQRYTAEQILKHSWITHRDQLPNDQPKRNDVSHVVKGAMVATYSALTHKTFQPVLEPVAASSLAQRRSMKKRTSTGL

SEQ ID NO: 337 - protein, 3197 aa, Homo sapiens
MEIRLEILTSTGIKQKKPWPRVSWLGKEKEAVFLLDDKFINEINLLSGKIKKKIPSLQPFLKDVIVLTTSSNDAWLAGVLTTGELFLWNKDQDCLKTIPITEKPKEMIKATVASSLRLYLYVSGNGKRIVLITPSGCIFLWEYLELKNILSSKSLSLAGRWSQVIPEEAVLLPSTEDKEAVVNAVFIKNELFGDCCLCSFTFYSGECLKLTFLAIRWHENVFTSVRSLPYHVHWAQQDCHLCSLIPKCESVKSRGALISAFSRDGLTLAVTLNQKDPKATQVLFINTLNFVTLCGSLKGCSNKSPVVPATLIRSYWVGDISWTHDSLFLACMLKRGSLVLLTCQGELLTLITFGCSIEFGPAEFIPLHPLITYRPQQFTFQDSNNSVDSSASDSDPMRQRFSIKAHSRLPYLVISDGYMVTTLRFLDSLSPSVHMRSLLLDSTQRLEKIYQSVILSKPKGKGLNLRSLNSLRSSLLEHQGNESSADFTVPKFLQAEETINENAADFQDFEAEETNEGRHFPDNLCPFWNKRDDVLCSSMKEGRLEFASMFDTIHAKDDSEETDRTITELHSIQKSLLAAWTIGISKTVTEKNLMLNYIVVCITHFFYILQFIKCPFPKLDLVLSKSSRHNAWILCIFQLFHQCLSIHYWDIRYKQDVGHLIKLTSNTVKLLLTQQQKGQLFSEKLLACFYLLKMVADNLNGVYILQPEVISASADGSKITAQDSLVVPIFQMFQDSGFQKNWSWNSFFKIHPQVVNPVQQPGHRLLILWRILYKKTLWYQAQLNRRVPEADSQLTEKMTHEASTVKSLLCHLQANLQSTGDCLNQTLELKSINGEECFLLGSYEKSVQLWKKALQEIEEKGGRRTYFLQIRYYLSLLYCHLYSYNLNDAQGLCDQLAREILRWSQLPVKENKDFSGAAKSHFECGMVGGVHPEAAVRVVQSMARFMAAYFTNQQLCILPPHHVNVLPPLHIKTEQSFRLIPLQHSKVASVVRDQNLSNVWTVEYALELLFIGGLVPEAVWLAYKLGDWKTSVSIGVAFQLFCKRDSNFMRSKKKSLNLPLRMTPAQIFQEKLQCVLGQPASLEAKNEMGSKYKQFTDPIEEEDANLLFGSVQEVLKASVMADADILSETFQLLIDSAKDFSKRLWGLVPFGLYLPAPPLYCPQPAILSEEDGDDLLLKAEKNNRQKVSGILQRVLLLFRAAQCSFPVAQWYILQLRWARKVMQKIRMKGSLPSLSPFPQSLLNYCKGGIAFFRPGAAGDHKLDEVSIRAIGCFRELCALCWMLHVRDKLSYSCRQYQKARENVKGEKDLEVEFDSCMIEHCLSAVEWAYRMLPFSRFFNMEELIQDIILSLIGELPPIRKVAEIFVKAFPYPEDVRVPLRDKYHSLHQRLRHCVVKGPQTEEMMSVVMHSIQKVRVKALKRVQRNIGSFEVNIWEPIEEEKPDEAPGVDRYSLGTSLSRSTLTELGDSVVHSDADTFSEALSVEEKSRINIYQRNAPNHMELTSIHKPTDKRKMCNQKENPTKKEDHEKLSQNTLPVIGVWEFERDDDEYIKFLDLFLSYILERDLPYSRDADIPFLTSFSGKLREHELNSLLFDVHTTLKRHQSKTKSQNVFRAGSCFVVAPESYESEKSSSLNDEYGMHLENQKLSSSVLVNQGIKPFLQYPSNEVNKNEGMSGLFGLKQRSIYKIQDDTREKCLIQRSSNHIFWTPKSIKTRRCIFKAIQCNDINPQEDLPLALNTFGSIGRLLEWMIRWSNRRLLCDSGITESSSEYSPVIRVKTSTAAILTSLWLLEQPYFATYKAKNAIIKMVENRDTGCQIGPNIERESKSDAGGSVAVATPGGTEERNGQNKSCQNILNRMPTEAKNPDIKEINDDIISITHNTKKEFIDIDENLLEVEAFTEEEMDMHISDYEEDIEESVGGFRSPSLAICMMTLPQQLEEEFTEEVQCQREEPLETIMEEKSTEQKGMIEAFSHPGHTTPQSMQVDTSSEISSAQISTYKEKSSSVPLLISNGVNVASQPPAPTPQKTQRNEFTAQLPDCSESVRQMLQDEMFKLVQLQQINFMSLMQIVGSSFANLPDTQQLVQQSQSVHLGESQESNLRGCGDVEDSNKNLKERFFIKPQSMGENAREPRKNSPHCHEGTIPSGQNSTGNVQNVPHGSIPLCQLNGQPRKKGPIPSSQNLPSTSFYPAPAGNTHLYLLSTPSVVQKAPRLIPHAKTFSPGDGFPLLQFKSKQEFQPLFLHTGSIPQVPFRPLPQPREAWGLSDSFQPALPQRAAQTTPASHLNVSQYNTEARKKEVEQKTWAETVITEIPNHVNLDQYVGQENLTPQQDSSVFIKPEKLFDVKPGTLEISPHHSFGLPLLYLPLKPPNMFPSTSRASITVPSTPIQPIAEERKYPRLSLLHSHLSPENRCKKTQLIPLENLIAFKQSQQKLTHNLFEQGDAGHLQLLKVKIEPPEVRQGKDSKKRQRRRAEKELQEKRCEKLRRKPNVTFRPENSIINNDDSEIIKKPKEQQEHCGSHPLDDFDVPFEMLQDDNTSAGLHFMASVKKKAIGSQDASTNTDPEHEPLTAPQLLVPDVYLNLKLSSEMSEKPWSPSIPHTVTNLELPVREEPSNDNVIKQQSDHLAVPSSAELHYMAASVTNAVPPHNFKSQGLPKPEFRFKGQSTKSDSAEDYLLWKRLQGVSAACPAPSSAAHQLEHLSAKLQKIDEQLLAIQNIAENIEQDFPKPEMLDLHCDKIGPVDHIEFSSGPEFKKTLASKTISISEEVRFLTHMDEEDQSDKKETSEPEFSITENYSGQKTCVFPTADSAVSLSSSSDQNTTSPGMNSSDELCESVSVHPLQMTGLTDIADIIDDLIIKDGVSSEELGLTEQAMGTSRIQHYSGRHSQRTDKERREIQAWMKRKRKERMAKYLNELAEKRGQEHDPFCPRSNPLYMTSREIRLRQKMKHEKDRLLLSEHYSRRISQAYGLMNELLSESVQLPTLPQKPLPNKPSPTQSSSCQHCPSPRGENQHGHSFLINRPGKVKYMSKPSYIHKRKSFGQPQGSPWPHGTATFTIQKKAGGAKAAVRKATQSPVTFQKGSNAPCHSLQHTKKHGSAGLAPQTKQVCVEYEREETVVSPWTIPSEIHKILHESHNSLLQDLSPTEEEEPEHPFGVGGVDSVSESTGSILSKLDWNAIEDMVASVEDQGLSVHWALDL

SEQ ID NO: 338 - protein, 995 aa, Homo sapiens
MATRGGAGVAMAVWSLLSARAVTAFLLLFLPRFLQAQTFSFPFQQPEKCDNNQYFDISALSCVPCGANQRQDARGTSCVCLPGFQMISNNGGPAIICKKCPENMKGVTEDGWNCISCPSDLTAEGKCHCPIGHILVERDINGTLLSQATCELCDGNENSFMVVNALGDRCVRCEPTFVNTSRSCACSEPNILTGGLCFSSTGNFPLRRISAARYGEVGMSLTSEWFAKYLQSSAAACWVYANLTSCQALGNMCVMNMNSYDFATFDACGLFQFIFENTAGLSTVHSISFWRQNLPWLFYGDQLGLAPQVLSSTSLPTNFSFKGENQNTKLKFVAASYDIRGNFLKWQTLEGGVLQLCPDTETRLNAAYSFGTTYQQNCEIPISKILIDFPTPIFYDVYLEYTDENQHQYILAVPVLNLNLQHNKIFVNQDSNSGKWLLTRRIFLVDAVSGRENDLGTQPRVIRVATQISLSVHLVPNTINGNIYPPLITIAYSDIDIKDANSQSVKVSFSVTYEMDHGEAHVQTDIALGVLGGLAVLASLLKTAGWKRRIGSPMIDLQTVVKFLVYYAGDLANVFFIITVGTGLYWLIFFKAQKSVSVLLPMPIQEERFVTYVGCAFALKALQFLHKLISQITIDVFFIDWERPKGKVLKAVEGEGGVRSATVPVSIWRTYFVANEWNEIQTVRKINSLFQVLTVLFFLEVVGFKNLALMDSSSSLSRNPPSYIAPYSCILRYAVSAALWLAIGIIQVVFFAVFYERFIEDKIRQFVDLCSMSNISVFLLSHKCFGYYIHGRSVHGHADTNMEEMNMNLKREAENLCSQRGLVPNTDGQTFEIAISNQMRQHYDRIHETLIRKNGPARLLSSSASTFEQSIKAYHMMNKFLGSFIDHVHKEMDYFIKDKLLLERILGMEFMEPMEKSIFYNDEGYSFSSVLYYGNEATLLIFDLLFFCVVDLACQNFILASFLTYLQQEIFRYIRNTVGQKNLASKTLVDQRFLI

SEQ ID NO: 339 - protein, 691 aa, Homo sapiens
MNAAVVRRTQEALGKVIRRPPLTEKLLSKPPFRYLHDIITEVIRMTGFMKGLYTDAEMKSDNVKDKDAKISFLQKAIDVVVMVSGEPLLAKPARIVAGHEPERTNELLQIIGKCCLNKLSSDDAVRRVLAGEKGEVKGRASLTSRSQELDNKNVREEESRVHKNTEDRGDAEIKERSTSRDRKQKEELKEDRKPREKDKDKEKAKENGGNRHREGERERAKARARPDNERQKDRGNRERDRDSERKKETERKSEGGKEKERLRDRDRERDRDKGKDRDRRRVKNGEHSWDLDREKNREHDKPEKKSASSGEMSKKLSDGTFKDSKAETETEISTRASKSLTTKTSKRRSKNSVEGRKEDNISAKSLDSIVSGINNEPNQETTTSEIGTKEANINSTSISDDNSASLRCENIQPNPTEKQKGDSTSDAEGDAGPAGQDKSEVPETPEIPNELSSNIRRIPRPGSARPAPPRVKRQDSMEALQMDRSGSGKTVSNVITESHNSDNEEDDQFVVEAAPQLSEMSEIEMVTAVELEEEEKHGGLVKKILETKKDYEKLQQSPKPGEKERSLFESAWKKEKDIVSKEIEKLRTSIQTLCKSALPLGKIMDYIQEDVDAMQNELQMWHSENRQHAEALQQEQRITDCAVEPLKAELAELEQLIKDQQDKICAVKANILKNEEKIQKMVYSINLTSRR

SEQ ID NO: 340 - protein, 600 aa, Homo sapiens
MASNHKSSAARPVSRGGVGLTGRPPSGIRPLSGNIRVATAMPPGTARPGSRGCPIGTGGVLSSQIKVAHRPVTQQGLTGMKTGTKGPQRQILDKSYYLGLLRSKISELTTEVNKLQKGIEMYNQENSVYLSYEKRAETLAVEIKELQGQLADYNMLVDKLNTNTEMEEVMNDYNMLKAQNDRETQSLDVIFTERQAKEKQIRSVEEEIEQEKQATDDIIKNMSFENQVKYLEMKTTNEKLLQELDTLQQQLDSQNMKKESLEAEIAHSQVKQEAVLLHEKLYELESHRDQMIAEDKSIGSPMEEREKLLKQIKDDNQEIASMERQLTDTKEKINQFIEEIRQLDMDLEEHQGEMNQKYKELKKREEHMDTFIETFEETKNQELKRKAQIEANIVALLEHCSRNINRIEQISSITNQELKMMQDDLNFKSTEVQKSQSTAQNLTSDIQRLQLDLQKMELLESKMTEEQHSLKSKIKQMTTDLEIYNDLPALKSSGEEKIKKLHQERMILSTHRNAFKKIMEKQNIEYEALKTQLQENETHSQLTNLERKWQHLEQNNFAMKEFIATKSQESDYQPIKKNVTKQIAEYNKTIVDALHSTSGN

SEQ ID NO: 341 - protein, 1400 aa, Homo sapiens
MMASFQRSNSHDKVRRIVAEEGRTARNLIAWSVPLESKDDDGKPKCQTGGKSKRTIQGTHKTTKQSTAVDCKITSSTTGDKHFDKSPTKTRHPRKIDLRARYWAFLFDNLRRAVDEIYVTCESDQSVVECKEVLMMLDNYVRDFKALIDWIQLQEKLEKTDAQSRPTSLAWEVKKMSPGRHVIPSPSTDRINVTSNARRSLNFGGSTGTVPAPRLAPTGVSWADKVKAHHTGSTASSEITPAQSCPPMTVQKASRKNERKDAEGWETVQRGRPIRSRSTAVMPKVSLATEATRSKDDSDKENVCLLPDESIQKGQFVGDGTSNTIESHPKDSLHSCDHPLAEKTQFTVSTLDDVKNSGSIRDNYVRTSEISAVHIDTECVSVMLQAGTPPLQVNEEKFPAEKARIENEMDPSDISNSMAEVLAKKEELADRLEKANEEAIASAIAEEEQLTREIEAEENNDINIETDNDSDFSASMGSGSVSFCGMSMDWNDVLADYEARESWRQNTSWGDIVEEEPARPPGHGIHMHEKLSSPSRKRTIAESKKKHEEKQMKAQQLREKLREEKTLKLQKLLEREKDVRKWKEELLDQRRRMMEEKLLHAEFKREVQLQAIVKKAQEEEAKVNEIAFINTLEAQNKRHDVLSKLKEYEQRLNELQEERQRRQEEKQARDEAVQERKRALEAERQARVEELLMKRKEQEARIEQQRQEKEKAREDAARERARDREERLAALTAAQQEAMEELQKKIQLKHDESIRRHMEQIEQRKEKAAELSSGRHANTDYAPKLTPYERKKQCSLCNVLISSEVYLFSHVKGRKHQQAVRENTSIQGRELSDEEVEHLSLKKYIIDIVVESTAPAEALKDGEERQKNKKKAKKIKARMNFRAKEYESLMETKNSGSDSPYKAKLQRLAKDLLKQVQVQDSGSWANNKVSALDRTLGEITRILEKENVADQIAFQAAGGLTALEHILQAVVPATNVNTVLRIPPKSLCNAINVYNLTCNNCSENCSDVLFSNKITFLMDLLIHQLTVYVPDENNTILGRNTNKQVFEGLTTGLLKVSAVVLGCLIANRPDGNCQPATPKIPTQEMKNKPSQGDPFNNRVQDLISYVVNMGLIDKLCACFLSVQGPVDENPKMAIFLQHAAGLLHAMCTLCFAVTGRSYSIFDNNRQDPTGLTAALQATDLAGVLHMLYCVLFHGTILDPSTASPKENYTQNTIQVAIQSLRFFNSFAALHLPAFQSIVGAEGLSLAFRHMASSLLGHCSQVSCESLLHEVIVCVGYFTVNHPDNQVIVQSGRHPTVLQKLCQLPFQYFSDPRLIKVLFPSLIAACYNNHQNKIILEQEMSCVLLATFIQDLAQTPGQAENQPYQPKGKCLGSQDYLELANRFPQQAWEEARQFFLKKEKK

SEQ ID NO: 342 - protein, 688 aa, Homo sapiens
MAAEIDFLREQNRRLNEDFRRYQMESFSKYSSVQKAVCQGEGDDTFENLVFDQSFLAPLVTEYDKHLGELNGQLKYYQKQVGEMKLQLENVIKENERLHSELKDAVEKKLEAFPLGTEVGTDIYADDETVRNLQEQLQLANQEKTQAVELWQTVSQELDRLHKLYQEHMTEAQIHVFESQKQKDQLFDFQQLTKQLHVTNENMEVTNQQFLKTVTEQSVIIEQLRKKLRQAKLELRVAVAKVEELTNVTEDLQGQMKKKEKDVVSAHGREEASDRRLQQLQSSIKQLEIRLCVTIQEANQLRTENTHLEKQTRELQAKCNELENERYEAIVRARNSMQLLEEANLQKSQALLEEKQKEEDIEKMKETVSRFVQDATIRTKKEVANTKKQCNIQISRLTEELSALQMECAEKQGQIERVIKEKKAVEEELEKIYREGRGNESDYRKLEEMHQRFLVSERSKDDLQLRLTRAENRIKQLETDSSEEISRYQEMIQKLQNVLESERENCGLVSEQRLKLQQENKQLRKETESLRKIALEAQKKAKVKISTMEHEFSIKERGFEVQLREMEDSNRNSIVELRHLLATQQKAANRWKEETKKLTESAEIRINNLKSELSRQKLHTQELLSQLEMANEKVAENEKLILEHQEKANRLQRRLSQAEERAASASQQLSVITVQRRKAASLMNLENI

SEQ ID NO: 343 - protein, 1533 aa, Homo sapiens
MPVKRLREVVSQNHGDHLVLLKDELPCVPPALSANKRLPVGTGTSLNGTSRGSSDLTSARNCYQPLLENPMVSESDFSKDVAVQVLPLDKIEENNKQKANDIFISQYTMGQKDALRTVLKQKAQSMPVFKEVKVHLLEDAGIEKDAVTQETRISPSGIDSATTVAAATAAAIATAAPLIKVQSDLEAKVNSVTELLSKLQETDKHLQRVTEQQTSIQRKQEKLHCHDHEKQMNVFMEQHIRHLEKLQQQQIDIQTHFISAALKTSSFQPVSMPSSRAVEKYSVKPEHPNLGSCNPSLYNTFASKQAPLKEVEDTSFDKQKSPLETPAPRRFAPVPVSRDDELSKRENLLEEKENMEVSCHRGNVRLLEQILNNNDSLTRKSESSNTTSLTRSKIGWTPEKTNRFPSCEELETTKVTMQKSDDVLHDLGQKEKETNSMVQPKESLSMLKLPDLPQNSVKLQTTNTTRSVLKDAEKILRGVQNNKKVLEENLEAIIRAKDGAAMYSLINALSTNREMSEKIRIRKTVDEWIKTISAEIQDELSRTDYEQKRFDQKNQRTKKGQNMTKDIRTNTQDKTVNKSVIPRKHSQKQIEEHFRNLPMRGMPASSLQKERKEGLLKATTVIQDEDYMLQVYGKPVYQGHRSTLKKGPYLRFNSPSPKSRPQRPKVIERVKGTKVKSIRTQTDFYATKPKKMDSKMKHSVPVLPHGDQQYLFSPSREMPTFSGTLEGHLIPMAILLGQTQSNSDTMPPAGVIVSKPHPVTVTTSIPPSSRKVETGVKKPNIAIVEMKSEKKDPPQLTVQVLPSVDIDSISNSSADVLSPLSSPKEASLPPVQTWIKTPEIMKVDEEEVKFPGTNFDEIIDVIQEEEKCDEIPDSEPILEFNRSVKADSTKYNGPPFPPVASTFQPTADILDKVIERKETLENSLIQWVEQEIMSRIISGLFPVQQQIAPSISVSVSETSEPLTSDIVEGTSSGALQLFVDAGVPVNSNVIKHFVNEALAETIAVMLGDREAKKQGPVATGVSGDASTNETYLPARVCTPLPTPQPTPPCSPSSPAKECVLVKTPDSSPCDSDHDMAFPVKEICAEKGDDMPAIMLVNTPTVTPTTTPPPAAAVFTPTLSDISIDKLKVSSPELPKPWGDGDLPLEEENPNSPQEELHPRAIVMSVAKDEEPESMDFPAQPPPPEPVPFMPFPAGTKAPSPSQMPGSDSSTLESTLSVTVTETETLDKPISEGEILFSCGQKLAPKILEDIGLYLTNLNDSLSSTLHDAVEMEDDPPSEGQVIRMSHKKFHADAILSFAKQNQESAVSQQAVYHSEDLENSVGELSEGQRPQLTAAAENILMGHSLYMQPPVTNTQSLDQQCDPKPLSRQFDTVSGSIYEDSCASHGPMSLGELELEPNSKLVLPTTLLTAQENDVNLPVAAEDFSQYQLKQNQDVKQVEHKPSQSYLRVRNKSDIAPSQQQVSPGDMDRTQIELNPYLTCVFSGGKAVPLSASQMPPAKMSVMLPSVNLEDCSQSLSLSTMQEDMESSGADTF

SEQ ID NO: 344 - protein, 697 aa, Homo sapiens
MGFQPPAALLLRLFLLQGILRLLWGDLAFIPPFIRMSGPAVSASLVGDTEGVTVSLAVLQDEAGILPIPTCGVLNNETEDWSVTVIPGAKVLEVTVRWKRGLDWCSSNETDSFSESPCILQTLLVSASHNSSCSAHLLIQVEIYANSSLTHNASENVTVIPNQVYQPLGPCPCNLTAGACDVRCCCDQECSSNLTTLFRRSCFTGVFGGDVNPPFDQLCSAGTTTRGVPDWFPFLCVQSPLANTPFLGYFYHGAVSPKQDSSFEVYVDTDAKDFADFGYKQGDPIMTVKKAYFTIPQVSLAGQCMQNAPVAFLHNFDVKCVTNLELYQERDGIINAKIKNVALGGIVTPKVIYEEATDLDKFITNTETPLNNGSTPRIVNVEEHYIFKWNNNTISEINVKIFRAEINAHQKGIMTQRFVVKFLSYNSGNEEELSGNPGYQLGKPVRALNINRMNNVTTLHLWQSAGRGLCTSATFKPILFGENVLSGCLLEVGINENCTQLRENAVERLDSLIQATHVAMRGNSDYADLSDGWLEIIRVDAPDPGADPLASSVNGMCLDIPAHLSIRILISDAGAVEGITQQEILGVETRFSSVNWQYQCGLTCEHKADLLPISASVQFIKIPAQLPHPLTRFQINYTEYDCNRNEVCWPQLLYPWTQYYQGELHSQCVAKGLLLLLFLTLALFLSNPWTRICKAYS

SEQ ID NO: 345 - protein, 428 aa, Homo sapiens
MFSLMASCCGWFKRWREPVRKVTLLMVGLDNAGKTATAKGIQGEYPEDVAPTVGFSKINLRQGKFEVTIFDLGGGIRIRGIWKNYYAESYGVIFVVDSSDEERMEETKEAMSEMLRHPRISGKPILVLANKQDKEGALGEADVIECLSLEKLVNEHKCLCQIEPCSAISGYGKKIDKSIKKGLYWLLHVIARDFDALNERIQKETTEQRALEEQEKQERAERVRKLREERKQNEQEQAELDGTSGLAELDPEPTNPFQPIASVIIENEGKLEREKKNQKMEKDSDGCHLKHKMEHEQIETQGQVNHNGQKNNEFGLVENYKEALTQQLKNEDETDRPSLESANGKKKTKKLRMKRNHRVEPLNIDDCAPESPTPPPPPPPVGWGTPKVTRLPKLEPLGETHHNDFYRKPLPPLAVPQRPNSDAHDVIS

SEQ ID NO: 346 - protein, 204 aa, Homo sapiens
MATASPSVFLLMVNGQVESAQFPEYDDLYCKYCFVYGQDWAPTAGLEEGISQITSKSQDVRQALVWNFPIDVTFKSTNPYGWPQIVLSVYGPDVFGNDVVRGYGAVHVPFSPGRHKRTIPMFVPESTSKLQKFTSWFMGRRPEYTDPKVVAQGEGREVTRVRSQGFVTLLFNVVTKDMRKLGYDTGPSDTQGVLGPSPPQSFPQ

SEQ ID NO: 347 - protein, 175 aa, Homo sapiens
MAEVHVIGQIIGASGFSESSLFCKWGIHTGAAWKLLSGVREGQTQVDTPQIGDMAYWSHPIDLHFATKGLQGWPRLHFQVWSQDSFGRCQLAGYGFCHVPSSPGTHQLACPTWRPLGSWREQLARAFVGGGPQLLHGDTIYSGADRYRLHTAAGGTVHLEIGLLLRNFDRYGVEC

SEQ ID NO: 348 - protein, 2353 aa, Homo sapiens
MKQRKGQGSGGSRGRKKRGLSDISPSTSLPPLVEGQLRCFLKLTVNRVIWKIAKPPTCVLVRVRWWGETSDGTLFCPRDALQTEPKAVRTTTRYAIRCGPKQFTSYLTDMAVLVLEVITKLDGLPIGRVQINGLAQLSPTHQINGFFTIVSSTSKKLGELQVSLALEPLSETYDSYHPLPTTDMTENVLLSKQGFRENTEPSSTQFQVPSRPRDIHTIKIDGKELAANSSRSTTPRGKDHVCFAENPDTIKDSSFGLQHSLNSGQSLESVTLKGRAPRKQMSLLNSSEFQPQIRTVAKSHSDSCILSSNNLPTKDLLSALLEQGNKLRNAMVISAMKSSPETSMLLDQVHPPINEDSLRASTQIRAFSRNRFKDHIEDHLLPSTENTFWRHDTKADTRAIQLLLGSAELSQGNFWDGLGSPPDSPSPGSDVYCISELNDPQYDQSLLENLFYTAPKSDTSISDFLSEEDDIVPSKKISQSTALARSSKVLESSDHKLKKRSAGKRNRNLVEQQMLSETPEDAQTMTLSVDRLALLGRTHSVRIIIETMGVPPDSPQMTPGKKSYAGPPPKVTTAKKRTFFVEYHFPVGFSESGLGKTALITEVVRLASSKITDGKVKFQQRFVFPVQFGGPMIEHWWNSNLTFQIYVKKTPQKKPEVIGSVSLSLRAVIQSELLSFSDQLPVQQENGQSPFGPLKVTMELITDNKDFTGINTKLSGNTHYTPLCAPTSPNKALPELNQDMTCTKNPQNLNQIHEETAKKAQNLVLPNRKSPSPVAPHPSTFVATPASHNLVNQTNGTTKESALLLHVLLMVPDGKDFISGESEKQSPCNVYLNCKLFSTEEVTRSVIAWGTTQPVFNFSQVIPVSLSSKYLERLKNNVMVIETWNKVRSPGQDKLLGLVKLPLHQFYMSFKDAKISRLLLDAQYPVVAVDSYMPVIDVFSGHQNGSLRVFLAMGSSNQIMALQRLKNEEGTLPPFSPRPAHFLDQPTAASVAMAEDRGNGLMEHCFEIHIEMVKGLAPLQATVWGEADCYVQYYFPVQHSQSSVLKGPEFLENGITLKPFRTATTLCVPDPIFNSEHHHSLLLPAEVPVQRLLLSAFSAQGLVPGGGVQFEIWCRYYYPNVRDQKVAKGTLPLSRICAMVTTQHREDVGIQTFNLPLTPRIENRKELRNQSSGLLDVGLRYRRSPRTAEGVLAARTVSISVQIIRACGLQAAAKALAEREPALQFSATVGVNASVTTHLSFLPQGEQRRTHPVACSFCPEFSHHVEFTCNLVTQHCSGEACFLAELLEFAEVIFAVYHENTKSASDIISIESCKEYLLGVVKVPTKELLIKRSGITGWYPIILPEDGGLPHGLELMQKIVGGLELSISFTHRGDRERVLEAAEHLGWSFENSLKDFVRMDEGEPATVTISTPRLWLPIHCVLLAGHNHIHKNTYCYLRYKFYDHEAFWTPLKKPKESVNKKQIMVTFKASKRAEVTRGPSLLWYFREERLEIQVWRAYGNDSVERPHQTDSWIGSAYVDLARLGERSARTLTVSGVYPLFGRNASNLSGAALRVHVVLSSLSSHLEPTHELDSMDCSSHSESEQLPRRNDEVQLSPPEVISCHQKSPASTQVPCSSTTAEVRLTQEGPADLDGTFAVSILVERAMHLSLKGSPLTERKVSIPSCCVSFATADESSPVYTQVVENTDSPIWNFQQQSRLSKELLLDPQQTLVFKVWHKGDEERVIGFASVDLSPLLSGFQFVCGWYNITDFSGECQGQIKVAVSPLESLIHFKEERQARRGVETSKSLIPIYSPFSFPASDTYAAFSSHMARQTLDQLAHASSKELDFSSPGRSDTTRSQASRHEEHVQNIRRFHESLHLQGEAPLPCDDKLTTSPLSSQTSILTSLRKNLSELDQIQRYFRQKLTKPFLPLSPQTQTAISQHQESCRDHLGPGASSLDPGSQCILEKSSNLVLQVSSLITDLQTITRDSQAALSSHRARSRSNKATTLPDAQDTEALQERCTMPDEPLVRAPDKGTDSPSPPPLEETSNGGRMLHESLRHAVPITRMQSSEDTEAGPAYSDEDYEEDIIEPRTLNEITTVTDKTSPWSSVISDTSEVISPQPDEVQREGPSCPSPGPFCREELMVKSSFLSSPERAVNPHLPRQGSPSQSLVACECEASKARVGGESASANPQPIPCPTLSGAQQSSTFVGWSSPQTDQNKEPKSEAPAENEAATSELGDSADSFKKLPLNLASQSRRENHKGPPIDSSDIRQRQVTTGSETSTKQSLLLPGPIVVPNFFLPPQQLEASLRMLSLSATLPPAATTDQDKSEATRGALSQRPCRPRPNSLPLNLPEEETLRIARIFSSQYSQKD

SEQ ID NO: 349 - protein, 373 aa, Homo sapiens
MSLRRHIGNPEYLMKRIPQNPRYQHIKSRLDTGNSMTKYTEKLEEIKKNYRYKKDELFKRLKVTTFAQLIIQVASLSDQTLEVTAEEIQRLEDNDSAASDPDAETTARTNGKGNPGEQSPSPEQFINNAGAGDSSRSTLQSVISGVGELDLDKGPVKKAEPHTKDKPYPDCPFLLLDVRDRDSYQQCHIVGAYSYPIATLSRTMNPYSNDILEYKNAHGKIIILYDDDERLASQAATTMCERGFENLFMLSGGLKVLAQKFPEGLITGSLPASCQQALPPGSARKRSSPKGPPLPAENKWRFTPEDLKKIEYYLEEEQGPADHPSRLNQANSSGRESKVPGARSAQNLPGGGPASHSNPRSLSSGHLQGKPWK

SEQ ID NO: 350 - protein, 925 aa, Homo sapiens
MPHKIGFVVVSSSGHEDGFSARELMIHAPTVSGWRSPRFCQFPQEIVLQMVERCRIRKLQLLAHQYMISSKIEFYISESLPEYFAPYQAERFRRLGYVSLCDNEKTGCKARELKSVYVDAVGQFLKLIFHQNHVNKYNIYNQVALVAINIIGDPADFSDESNTASREKLIDHYLGHNSEDPALEGTYARKSDYISPLDDLAFDMYQDPEVAQIIRKLDERKREAVQKERYDYAKKLKQAIADLQKVGERLGRYEVEKRCAVEKEDYDLAKEKKQQMEQYRAEVYEQLELHSLLDAELMRRPFDLPLQPLARSGSPCHQKPMPSLPQLEERGTENQFAEPFLQEKPSSYSLTISPQHSAVDPLLPATDPHPKINAESLPYDERPLPAIRKHYGEAVVEPEMSNADISDARRGGMLGEPEPLTEKALREASSAIDVLGETLVAEAYCKTWSYREDALLALSKKLMEMPVGTPKEDLKNTLRASVFLVRRAIKDIVTSVFQASLKLLKMIITQYIPKHKLSKLETAHCVERTIPVLLTRTGDSSARLRVTAANFIQEMALFKEVKSLQIIPSYLVQPLKANSSVHLAMSQMGLLARLLKDLGTGSSGFTIDNVMKFSVSALEHRVYEVRETAVRIILDMYRQHQASILEYLPPDDSNTRRNILYKTIFEGFAKIDGRATDAEMRARRKAATEEAEKQKKEEIKALQGQLAALKEIQAEVQEKESDAVKPKNQDIQGGKAAPAEALGIPDEHYLDNLCIFCGERSESFTEEGLDLHYWKHCLMLTRCDHCKQVVEISSLTEHLLTECDKKDGFGKCYRCSEAVFKEELPRHIKHKDCNPAKPEKLANRCPLCHENFSPGEEAWKAHLMGPAGCTMNLRKTHILQKAPALQPGKSSAVAASGPLGSKAGSKIPTPKGGLSKSSSRTYAKR

SEQ ID NO: 351 - protein, 986 aa, Homo sapiens
MVSKSDQLLIVVSILEGRHFPKRPKHMLVVEAKFDGEQLATDPVDHTDQPEFATELAWEIDRKALHQHRLQRTPIKLQCFALDPVTSAKETIGYIVLDLRTAQETKQAPKWYQLLSNKYTKFKSEIQISIALETDTKPPVDSFKAKGAPPRDGKVPAILAGLDPRDIVAVLNEEGGYHQIGPAEYCTDSFIMSVTIAFATQLEQLIPCTMKLPERQPEFFFYYSLLGNDVTNEPFNDLINPNFEPERASVRIRSSVEILRVYLALQSKLQIHLCCGDQSLGSTEIPLTGLLKKGSTEINQHPVTVEGAFTLDPPNRAKQKLAPIPVELAPTVGVSVALQREGIDSQSLIELKTQNEHEPEHSKKKVLTPIKEKTLTGPKSPTVSPVPSHNQSPPTKDDATESEVESLQYDKDTKPNPKASSSVPASLAQLVTTSNASEVASGQKIAVPATSHHFCFSIDLRSIHALEIGFPINCILRYSYPFFGSAAPIMTNPPVEVRKNMEVFLPQSYCAFDFATMPHQLQDTFLRIPLLVELWHKDKMSKDLLLGIARIQLSNILSSEKTRFLGSNGEQCWRQTYSESVPVIAAQGSNNRIADLSYTVTLEDYGLVKMREIFISDSSQGVSAVQQKPSSLPPAPCPSEIQTEPRETLEYKAALELEMWKEMQEDIFENQLKQKELAHMQALAEEWKKRDRERESLVKKKVAEYTILEGKLQKTLIDLEKREQQLASVESELQREKKELQSERQRNLQELQDSIRRAKEDCIHQVELERLKIKQLEEDKHRLQQQLNDAENKYKILEKEFQQFKDQQNNKPEIRLQSEINLLTLEKVELERKLESATKSKLHYKQQWGRALKELARLKQREQESQMARLKKQQEELEQMRLRYLAAEEKDTVKTERQELLDIRNELNRLRQQEQKQYQDSTEIASGKKDGPHGSVLEEGLDDYLTRLIEERDTLMRTGVYNHEDRIISELDRQIREILAKSNASN

SEQ ID NO: 352 - protein, 1749 aa, Homo sapiens; identical to SEQ ID NO: 55

SEQ ID NO: 353 - protein, 1618 aa, Homo sapiens
MDGQTLRKAERSWSCSREKKEGYAKDMVTDFDEKHDEYLILLQQRNRILKHLKSKDPVQLRLEHLEQGFSVYVNGANSELKSSPRKAIHSDFSRSASHTEGTHDYGRRTLFREAEEALRRSSRTAPSKVQRRGWHQKSVQIRTEAGPRLHIEPPVDYSDDFELCGDVTLQANNTSEDRPQELRRSLELSVNLQRKQKDCSSDEYDSIEEDILSEPEPEDPALVGHPRHDRPPSSGDWTQKDVHGEQETEGRSSPGPDTLVVLEFNPASKSHKRERNLSAKRKDNAEVFVPTKPEPNLTPQAPAVFPDQERMCSRPGSRRERPLSATRKTLCEAEYPEEDASAVLQAIQVENAALQRALLSRKAEQPASPLQDAEGPPAKPWTSLLEEKEETLELLPITTATTTQEPAGAAGGARAINQAMDRIGLLGSRQQQKLLKVLQAVESDSAHLGRVVSPTKEQVSDTEDKQRMRADEIKDAIYVTMEILSNWGNSWWVGLTEVEFFDLNDTKLYVSPHDVDIRNTATPGELGRLVNRNLAGKKDSSPWTCPFHPPLQLFFVIRNTRQLGDFHLAKIKVRNYWTADGDLDIGAKNVKLYVNRNLIFNGKLDKGDREAPADHSILVDQKNEKSEQLEEAMNAHSEESKGTHEMAGASGDKELGLGCSPPAETLADAKLSSQGNVSGKRKNSTNCRKDSLSQLEEYLRLSAVPTSMGDMPSAPATSPPVKCPPVHEEPSLIQQLENLMGRKICEPPGKTPSWLQPSPTGKDRKQGGRKPKPLWLSPEKPLAWKGRLPSDDVIGEGPGETEARDKGLRHEPGWGTSRSVNTKERPQRATTKVHSDDSDIFNQPPNRERPASGRRGSRKDAGSSSHGDDQPASREDTWSSRTPSRSRWRSEQEHTLHESWSSLSAFDRSHRGRISNTELPGDILDELLQQKSSRHSDLPPSKKGEQPGLSRGQDGYSGETDAGGDFKIPVLPYGQRLVIDIKSTWGDRHYVGLNGIEIFSSKGEPVQISNIKADPPDINILPAYGKDPRVVTNLIDGVNRTQDDMHVWLAPFTRGRSHSITIDFTHPCHVALIRIWNYNKSRIHSFRGVKDITMLLDTQCIFEGEIAKASGTLAGAPEHFGDTILFTTDDDILEAIFYSDEMFDLDVGSLDSLQDEEAMRRPSTADGEGDERPFTQAGLGADERIPELELPSSSPVPQVTTPEPGIYHGICLQLNFTASWGDLHYLGLTGLEVVGKEGQALPIHLHQISASPRDLNELPEYSDDSRALDKLIDGTNITMEDEHMWLIPFSPGLDHVVTIRLDRAESIAGLRFWNYNKSPEDTYRGAKIVHVSLDGLCVSPPEGFLIRKGPGNCHFDFAQEILFVDYLRAQLLPQPARRLDMRSLECASMDYEAPLMPCGFIFQFQLLTSWGDPYYIGLTGLELYDERGEKIPLSENNIAAFPDSVNSLEGVGGDVRTPDKLIDQVNDTSDGRHMWLAPILPGLVNRVYVIFDLPTTVSMIKLWNYAKTPHRGVKEFGLLVDDLLVYNGILAMVSHLVGGILPTCEPTVPYHTILFTEDRDIRHQEKHTTISNQAEDQDVQMMNENQIITNAKRKQSVVDPALRPKTCISEKETRRRRC

SEQ ID NO: 354 - protein, 1343 aa, Homo sapiens
MGLEAQRLPGAEEAPVRVALRVRPLLPKELLHGHQSCLQVEPGLGRVTLGRDRHFGFHVVLAEDAGQEAVYQACVQPLLEAFFEGFNATVFAYGQTGSGKTYTMGEASVASLLEDEQGIVPRAMAEAFKLIDENDLLDCLVHVSYLEVYKEEFRDLLEVGTASRDIQLREDERGNVVLCGVKEVDVEGLDEVLSLLEMGNAARHTGATHLNHLSSRSHTVFTVTLEQRGRAPSRLPRPAPGQLLVSKFHFVDLAGSERVLKTGSTGERLKESIQINSSLLALGNVISALGDPQRRGSHIPYRDSKITRILKDSLGGNAKTVMIACVSPSSSDFDETLNTLNYASRAQNIRNRATVNWRPEAERPPEETASGARGPPRHRSETRIIHRGRRAPGPATASAAAAMRLGAECARYRACTDAAYSLLRELQAEPGLPGAAARKVRDWLCAVEGERSALSSASGPDSGIESASVEDQAAQGAGGRKEDEGAQQLLTLQNQVARLEEENRDFLAALEDAMEQYKLQSDRLREQQEEMVELRLRLELVRPGWGGPRLLNGLPPGSFVPRPHTAPLGGAHAHVLGMVPPACLPGDEVGSEQRGEQVTNGREAGAELLTEVNRLGSGSSAASEEEEEEEEPPRRTLHLRRNRISNCSQRAGARPGSLPERKGPELCLEELDAAIPGSRAVGGSKARVQARQVPPATASEWRLAQAQQKIRELAINIRMKEELIGELVRTGKAAQALNRQHSQRIRELEQEAEQVRAELSEGQRQLRELEGKELQDAGERSRLQEFRRRVAAAQSQVQVLKEKKQATERLVSLSAQSEKRLQELERNVQLMRQQQGQLQRRLREETEQKRRLEAEMSKRQHRVKELELKHEQQQKILKIKTEEIAAFQRKRRSGSNGSVVSLEQQQKIEEQKKWLDQEMEKVLQQRRALEELGEELHKREAILAKKEALMQEKTGLESKRLRSSQALNEDIVRVSSRLEHLEKELSEKSGQLRQGSAQSQQQIRGEIDSLRQEKDSLLKQRLEIDGKLRQGSLLSPEEERTLFQLDEAIEALDAAIEYKNEAITCRQRVLRASASLLSQCEMNLMAKLSYLSSSETRALLCKYFDKVVTLREEQHQQQIAFSELEMQLEEQQRLVYWLEVALERQRLEMDRQLTLQQKEHEQNMQLLLQQSRDHLGEGLADSRRQYEARIQALEKELGRYMWINQELKQKLGGVNAVGHSRGGEKRSLCSEGRQAPGNEDELHLAPELLWLSPLTEGAPRTREETRDLVHAPLPLTWKRSSLCGEEQGSPEELRQREAAEPLVGRVLPVGEAGLPWNFGPLSKPRRELRRASPGMIDVRKNPL

SEQ ID NO: 355 - protein, 150 aa, Homo sapiens
MSAKDERAREILRGFKLNWMNLRDAETGKILWQGTEDLSVPGVEHEARVPKKILKCKAVSRELNFSSTEQMEKFRLEQKVYFKGQCLEEWFFEFGFVIPNSTNTWQSLIEAAPESQMMPASVLTGNVIIETKFFDDDLLVSTSRVRLFYV

SEQ ID NO: 356 - protein, 587 aa, Homo sapiens
MRPRGLPPLLVVLLGCWASVSAQTDATPAVTTEGLNSTEAALATFGTFPSTRPPGTPRAPGPSSGPRPTPVTDVAVLCVCDLSPAQCDINCCCDPDCSSVDFSVFSACSVPVVTGDSQFCSQKAVIYSLNFTANPPQRVFELVDQINPSIFCIHITNYKPALSFINPEVPDENNFDTLMKTSDGFTLNAESYVSFTTKLDIPTAAKYEYGVPLQTSDSFLRFPSSLTSSLCTDNNPAAFLVNQAVKCTRKINLEQCEEIEALSMAFYSSPEILRVPDSRKKVPITVQSIVIQSLNKTLTRREDTDVLQPTLVNAGHFSLCVNVVLEVKYSLTYTDAGEVTKADLSFVLGTVSSVVVPLQQKFEIHFLQENTQPVPLSGNPGYVVGLPLAAGFQPHKGSGIIQTTNRYGQLTILHSTTEQDCLALEGVRTPVLFGYTMQSGCKLRLTGALPCQLVAQKVKSLLWGQGFPDYVAPFGNSQAQDMLDWVPIHFITQSFNRKDSCQLPGALVIEVKWTKYGSLLNPQAKIVNVTANLISSSFPEANSGNERTILISTAVTFVDVSAPAEAGFRAPPAINARLPFNFFFPFV

SEQ ID NO: 357 - protein, 607 aa, Homo sapiens
MRTPQLALLQVFFLVFPDGVRPQPSSSPSGAVPTSLELQRGTDGGTLQSPSEATATRPAVPGLPTVVPTLVTPSAPGNRTVDLFPVLPICVCDLTPGACDINCCCDRDCYLLHPRTVFSFCLPGSVRSSSWVCVDNSVIFRSNSPFPSRVFMDSNGIRQFCVHVNNSNLNYFQKLQKVNATNFQALAAEFGGESFTSTFQTQSPPSFYRAGDPILTYFPKWSVISLLRQPAGVGAGGLCAESNPAGFLESKSTTCTRFFKNLASSCTLDSALNAASYYNFTVLKVPRSMTDPQNMEFQVPVILTSQANAPLLAGNTCQNVVSQVTYEIETNGTFGIQKVSVSLGQTNLTVEPGASLQQHFILRFRAFQQSTAASLTSPRSGNPGYIVGKPLLALTDDISYSMTLLQSQGNGSCSVKRHEVQFGVNAISGCKLRLKKADCSHLQQEIYQTLHGRPRPEYVAIFGNADPAQKGGWTRILNRHCSISAINCTSCCLIPVSLEIQVLWAYVGLLSNPQAHVSGVRFLYQCQSIQDSQQVTEVSLTTLVNFVDITQKPQPPRGQPKMDWKWPFDFFPFKVAFSRGVFSQKCSVSPILILCLLLLGVLNLETM

SEQ ID NO: 358 - protein, 140 aa, Homo sapiens
MGRVSGLVPSRFLTLLAHLVVVITLFWSRDSNIQACLPLTFTPEEYDKQDIQLVAALSVTLGLFAVELAGFLSGVSMFNSTQSLISIGAHCSASVALSFFIFERWECTTYWYIFVFCSALPAVTEMALFVTVFGLKKKPF

SEQ ID NO: 359 - protein, 162 aa, Homo sapiens
MLQTSNYSLVLSLQFLLLSYDLFVNSFSELLQKTPVIQLVLFIIQDIAVLFNIIIIFLMFFNTFVFQAGLVNLLFHKFKGTIILTAVYFALSISLHVWVMNLRWKNSNSFIWTDGLQMLFVFQRLAAVLYCYFYKRTAVRLGDPHFYQDSLWLRKEFMQVRR

SEQ ID NO: 360 - protein, 316 aa, Homo sapiens
MALYELFSHPVERSYRAGLCSKAALFLLLAAALTYIPPLLVAFRSHGFWLKRSSYEEQPTVRFQHQVLLVALLGPESDGFLAWSTFPAFNRLQGDRLRVPLVSTREEDRNQDGKTDMLHFKLELPLQSTEHVLGVQLILTFSYRLHRMATLVMQSMAFLQSSFPVPGSQLYVNGDLRLQQKQPLSCGGLDARYNISVINGTSPFAYDYDLTHIVAAYQERNVTTVLNDPNPIWLVGRAADAPFVINAIIRYPVEVISYQPGFWEMVKFAWVQYVSILLIFLWVFERIKIFVFQNQVVTTIPVTVTPRGDLCKEHLS

SEQ ID NO: 361 - protein, 1316 aa, Homo sapiens
MDSQELKTLINYYCQERYFHHVLLVASEGIKRYGSDPVFRFYHAYGTLMEGKTQEALREFEAIKNKQDVSLCSLLALIYAHKMSPNPDREAILESDARVKEQRKGAGEKALYHAGLFLWHIGRHDKAREYIDRMIKISDGSKQGHVLKAWLDITRGKEPYTKKALKYFEEGLQDGNDTFALLGKAQCLEMRQNYSGALETVNQIIVNFPSFLPAFVKKMKLQLALQDWDQTVETAQRLLLQDSQNVEALRMQALYYVCREGDIEKASTKLENLGNTLDAMEPQNAQLFYNITLAFSRTCGRSQLILQKIQTLLERAFSLNPQQSEFATELGYQMILQGRVKEALKWYKTAMTLDETSVSALVGFIQCQLIEGQLQDADQQLEFLNEIQQSIGKSAELIYLHAVLAMKKNKRQEEVINLLNDVLDTHFSQLEGLPLGIQYFEKLNPDFLLEIVMEYLSFCPMQPASPGQPLCPLLRRCISVLETVVRTVPGLLQTVFLIAKVKYLSGDIEAAFNNLQHCLEHNPSYADAHLLLAQVYLSQEKVKLCSQSLELCLSYDFKVRDYPLYHLIKAQSQKKMGEIADAIKTLHMAMSLPGMKRIGASTKSKDRKTEVDTSHRLSIFLELIDVHRLNGEQHEATKVLQDAIHEFSGTSEEVRVTIANADLALAQGDIERALSILQNVTAEQPYFIEAREKMADIYLKHRKDKMLYITCFREIAERMANPRSFLLLGDAYMNILEPEEAIVAYEQALNQNPKDGTLASKMGKALIKTHNYSMAITYYEAALKTGQKNYLCYDLAELLLKLKWYDKAEKVLQHALAHEPVNELSALMEDGRCQVLLAKVYSKMEKLGDAITALQQARELQARVLKRVQMEQPDAVPAQKHLAAEICAEIAKHSVAQRDYEKAIKFYREALVHCETDNKIMLELARLYLAQDDPDSCLRQCALLLQSDQDNEAATMMMADLMFRKQDYEQAVFHLQQLLERKPDNYMTLSRLIDLLRRCGKLEDVPRFFSMAEKRNSRAKLEPGFQYCKGLYLWYTGEPNDALRHFNKARKDRDWGQNALYNMIEICLNPDNETVGGEVFENLDGDLGNSTEKQESVQLAVRTAEKLLKELKPQTVQGHVQLRIMENYCLMATKQKSNVEQALNTFTEIAASEKEHIPALLGMATAYMILKQTPRARNQLKRIAKMNWNAIDAEEFEKSWLLLADIYIQSAKYDMAEDLLKRCLRHNRSCCKAYEYMGYIMEKEQAYTDAALNYEMAWKYSNRTNPAVGYKLAFNYLKAKRYVDSIDICHQVLEAHPTYPKIRKDILDKARASLRP

SEQ ID NO: 362 - protein, 523 aa, Homo sapiens
MESAPAAPDPAASEPGSSGADAAAGSRETPLNQESARKSEPPAPVRRQSYSSTSRGISVTKKTHTSQIEIIPCKICGDKSSGIHYGVITCEGCKGFFRRSQQSNATYSCPRQKNCLIDRTSRNRCQHCRLQKCLAVGMSRDAVKFGRMSKKQRDSLYAEVQKHRMQQQQRDHQQQPGEAEPLTPTYNISANGLTELHDDLSNYIDGHTPEGSKADSAVSSFYLDIQPSPDQSGLDINGIKPEPICDYTPASGFFPYCSFTNGETSPTVSMAELEHLAQNISKSHLETCQYLREELQQITWQTFLQEEIENYQNKQREVMWQLCAIKITEAIQYVVEFAKRIDGFMELCQNDQIVLLKAGSLEVVFIRMCRAFDSQNNTVYFDGKYASPDVFKSLGCEDFISFVFEFGKSLCSMHLTEDEIALFSAFVLMSADRSWLQEKVKIEKLQQKIQLALQHVLQKNHREDGILTKLICKVSTLRALCGRHTEKLMAFKAIYPDIVRLHFPPLYKELFTSEFEPAMQIDG

SEQ ID NO: 363 - protein, 241 aa, Homo sapiens
MSMLFYTLITAFLIGIQAEPHSESNVPAGHTIPQAHWTKLQHSLDTALRRARSAPAAAIAARVAGQTRNITVDPRLFKKRRLRSPRVLFSTQPPREAADTQDLDFEVGGAAPFNRTHRSKRSSSHPIFHRGEFSVCDSVSVWVGDKTTATDIKGKEVMVLGEVNINNSVFKQYFFETKCRDPNPVDSGCRGIDSKHWNSYCTTTHTFVKALTMDGKQAAWRFIRIDTACVCVLSRKAVRRA

SEQ ID NO: 364 - protein, 703 aa, Homo sapiens
MLGTLTPLSSLLLLLLVLVLGCGPRASSGGGAGGAAGYAPVKYIQPMQKGPVGPPFREGKGQYLEMPLPLLPMDLKGEPGPPGKPGPRGPPGPPGFPGKPGMGKPGLHGQPGPAGPPGFSRMGKAGPPGLPGKVGPPGQPGLRGEPGIRGDQGLRGPPGPPGLPGPSGITIPGKPGAQGVPGPPGFQGEPGPQGEPGPPGDRGLKGDNGVGQPGLPGAPGQGGAPGPPGLPGPAGLGKPGLDGLPGAPGDKGESGPPGVPGPRGEPGAVGPKGPPGVDGVGVPGAAGLPGPQGPSGAKGEPGTRGPPGLIGPTGYGMPGLPGPKGDRGPAGVPGLLGDRGEPGEDGEPGEQGPQGLGGPPGLPGSAGLPGRRGPPGPKGEAGPGGPPGVPGIRGDQGPSGLAGKPGVPGERGLPGAHGPPGPTGPKGEPGFTGRPGGPGVAGALGQKGDLGLPGQPGLRGPSGIPGLQGPAGPIGPQGLPGLKGEPGLPGPPGEGRAGEPGTAGPTGPPGVPGSPGITGPPGPPGPPGPPGAPGAFDETGIAGLHLPNGGVEGAVLGKGGKPQFGLGELSAHATPAFTAVLTSPFPASGMPVKFDRTLYNGHSGYNPATGIFTCPVGGVYYFAYHVHVKGTNVWVALYKNNVPATYTYDEYKKGYLDQASGGAVLQLRPNDQVWVQMPSDQANGLYSTEYIHSSFSGFLLCPT

SEQ ID NO: 365 - protein, 875 aa, Homo sapiens
MAAATRRVFHLQPCENSPTMSQNGYFEDSSYYKCDTDDTFEAREEILGDEAFDTANSSIVSGESIRFFVNVNLEMQATNTENEATSGGCVLLHTSRKYLKLKNFKEEIRAHRDLDGFLAQASIVLNETATSLDNVLRTMLRRFARDPDNNEPNCNLDLLMAMLFTDAGAPMRGKVHLLSDTIQGVTATVTGVRYQQSWLCIICTMKALQKRHVCISRLVRPQNWGENSCEVRFVILVLAPPKMKSTKTAMEVARTFATMFSDIAFRQKLLETRTEEEFKEALVHQRQLLTMVSHGPVAPRTKERSTVSLPAHRHPEPPKCKDFVPFGKGIREDIARRFPLYPLDFTDGIIGKNKAVGKYITTTLFLYFACLLPTIAFGSLNDENTDGAIDVQKTIAGQSIGGLLYALFSGQPLVILLTTAPLALYIQVIRVICDDYDLDFNSFYAWTGLWNSFFLALYAFFNLSLVMSLFKRSTEEIIALFISITFVLDAVKGTVKIFWKYYYGHYLDDYHTKRTSSLVSLSGLGASLNASLHTALNASFLASPTELPSATHSGQATAVLSLLIMLGTLWLGYTLYQFKKSPYLHPCVREILSDCALPIAVLAFSLISSHGFREIEMSKFRYNPSESPFAMAQIQSLSLRAVSGAMGLGFLLSMLFFIEQNLVAALVNAPENRLVKGTAYHWDLLLLAIINTGLSLFGLPWIHAAYPHSPLHVRALALVEERVENGHIYDTIVNVKETRLTSLGASVLVGLSLLLLPVPLQWIPKPVLYGLFLYIALTSLDGNQLVQRVALLLKEQTAYPPTHYIRRVPQRKIHYFTGLQVLQLLLLCAFGMSSLPYMKMIFPLIMIAMIPIRYILLPRIIEAKYLDVMDAEHRP

SEQ ID NO: 366 - protein, 1124 aa, Homo sapiens
MADGPRCKRRKQANPRRNNVTNYNTVVETNSDSDDEDKLHIVEEESVTDAADCEGVPEDDLPTDQTVLPGRSSEREGNAKNCWEDDRKEGQEILGPEAQADEAGCTVKDDECESDAENEQNHDPNVEEFLQQQDTAVIFPEAPEEDQRQGTPEASGHDENGTPDAFSQLLTCPYCDRGYKRFTSLKEHIKYRHEKNEDNFSCSLCSYTFAYRTQLERHMTSHKSGRDQRHVTQSGCNRKFKCTECGKAFKYKHHLKEHLRIHSGEKPYECPNCKKRFSHSGSYSSHISSKKCISLIPVNGRPRTGLKTSQCSSPSLSASPGSPTRPQIRQKIENKPLQEQLSVNQIKTEPVDYEFKPIVVASGINCSTPLQNGVFTGGGPLQATSSPQGMVQAVVLPTVGLVSPISINLSDIQNVLKVAVDGNVIRQVLENNQANLASKEQETINASPIQQGGHSVISAISLPLVDQDGTTKIIINYSLEQPSQLQVVPQNLKKENPVATNSCKSEKLPEDLTVKSEKDKSFEGGVNDSTCLLCDDCPGDINALPELKHYDLKQPTQPPPLPAAEAEKPESSVSSATGDGNLSPSQPPLKNLLSLLKAYYALNAQPSAEELSKIADSVNLPLDVVKKWFEKMQAGQISVQSSEPSSPEPGKVNIPAKNNDQPQSANANEPQDSTVNLQSPLKMTNSPVLPVGSTTNGSRSSTPSPSPLNLSSSRNTQGYLYTAEGAQEEPQVEPLDLSLPKQQGELLERSTITSVYQNSVYSVQEEPLNLSCAKKEPQKDSCVTDSEPVVNVIPPSANPINIAIPTVTAQLPTIVAIADQNSVPCLRALAANKQTILIPQVAYTYSTTVSPAVQEPPLKVIQPNGNQDERQDTSSEGVSNVEDQNDSDSTPPKKKMRKTENGMYACDLCDKIFQKSSSLLRHKYEHTGKRPHECGICKKAFKHKHHLIEHMRLHSGEKPYQCDKCGKRFSHSGSYSQHMNHRYSYCKREAEERDSTEQEEAGPEILSNEHVGARASPSQGDSDERESLTREEDEDSEKEEEEEDKEMEELQEEKECEKPQGDEEEEEEEEEVEEEEVEEAENEGEEAKTEGLMKDDRAESQASSLGQKVGESSEQVSEEKTNEA

SEQ ID NO: 367 - protein, 493 aa, Homo sapiens
MTCGFNSIGCGFRPGNFSCVSACGPRPSRCCITAAPYRGISCYRGLTGGFGSHSVCGGFRAGSCGRSFGYRSGGVCGPSPPCITTVSVNESLLTPLNLEIDPNAQCVKQEEKEQIKSLNSRFAAFIDKVRFLEQQNKLLETKLQFYQNRECCQSNLEPLFAGYIETLRREAECVEADSGRLASELNHVQEVLEGYKKKYEEEVALRATAENEFVALKKDVDCAYLRKSDLEANVEALIQEIDFLRRLYEEEIRILQSHISDTSVVVKLDNSRDLNMDCIVAEIKAQYDDIATRSRAEAESWYRSKCEEMKATVIRHGETLRRTKEEINELNRMIQRLTAEVENAKCQNSKLEAAVAQSEQQGEAALSDARCKLAELEGALQKAKQDMACLIREYQEVMNSKLGLDIEIATYRRLLEGEEQRLCEGVEAVNVCVSSSRGGVVCGDLCVSGSRPVTGSVCSAPCNGNLVVSTGLCKPCGQLNTTCGGGSCGQGRH

SEQ ID NO: 368 - protein, 494 aa, Homo sapiens
MDLSNNTMSLSVRTPGLSRRLSSQSVIGRPRGMSASSVGSGYGGSAFGFGASCGGGFSAASMFGSSSGFGGGSGSSMAGGLGAGYGRALGGGSFGGLGMGFGGSPGGGSLGILSGNDGGLLSGSEKETMQNLNDRLASYLDKVRALEEANTELENKIREWYETRGTGTADASQSDYSKYYPLIEDLRNKIISASIGNAQLLLQIDNARLAAEDFRMKYENELALRQGVEADINGLRRVLDELTLTRTDLEMQIESLNEELAYMKKNHEDELQSFRVGGPGEVSVEMDAAPGVDLTRLLNDMRAQYETIAEQNRKDAEAWFIEKSGELRKEISTNTEQLQSSKSEVTDLRRAFQNLEIELQSQLAMKKSLEDSLAEAEGDYCAQLSQVQQLISNLEAQLLQVRADAERQNVDHQRLLNVKARLELEIETYRRLLDGEAQGDGLEESLFVTDSKSQAQSTDSSKDPTKTRKIKTVVQEMVNGEVVSSQVQEIEELM

SEQ ID NO: 369 - protein, 683 aa, Homo sapiens
MALFVRLLALALALALGPAATLAGPAKSPYQLVLQHSRLRGRQHGPNVCAVQKVIGTNRKYFTNCKQWYQRKICGKSTVISYECCPGYEKVPGEKGCPAALPLSNLYETLGVVGSTTTQLYTDRTEKLRPEMEGPGSFTIFAPSNEAWASLPAEVLDSLVSNVNIELLNALRYHMVGRRVLTDELKHGMTLTSMYQNSNIQIHHYPNGIVTVNCARLLKADHHATNGVVHLIDKVISTITNNIQQIIEIEDTFETLRAAVAASGLNTMLEGNGQYTLLAPTNEAFEKIPSETLNRILGDPEALRDLLNNHILKSAMCAEAIVAGLSVETLEGTTLEVGCSGDMLTINGKAIISNKDILATNGVIHYIDELLIPDSAKTLFELAAESDVSTAIDLFRQAGLGNHLSGSERLTLLAPLNSVFKDGTPPIDAHTRNLLRNHIIKDQLASKYLYHGQTLETLGGKKLRVFVYRNSLCIENSCIAAHDKRGRYGTLFTMDRVLTPPMGTVMDVLKGDNRFSMLVAAIQSAGLTETLNREGVYTVFAPTNEAFRALPPRERSRLLGDAKELANILKYHIGDEILVSGGIGALVRLKSLQGDKLEVSLKNNVVSVNKEPVAEPDIMATNGVVHVITNVLQPPANRPQERGDELADSALEIFKQASAFSRASQRSVRLAPVYQKLLERMKH

SEQ ID NO: 370 - protein, 323 aa, Homo sapiens
MARGPGLAPPPLRLPLLLLVLAAVTGHTAAQDNCTCPTNKMTVCSPDGPGGRCQCRALGSGMAVDCSTLTSKCLLLKARMSAPKNARTLVRPSEHALVDNDGLYDPDCDPEGRFKARQCNQTSVCWCVNSVGVRRTDKGDLSLRCDELVRTHHILIDLRHRPTAGAFNHSDLDAELRRLFRERYRLHPKFVAAVHYEQPTIQIELRQNTSQKAAGDVDIGDAAYYFERDIKGESLFQGRGGLDLRVRGEPLQVERTLIYYLDEIPPKFSMKRLTAGLIAVIVVVVVALVAGMAVLVITNRRKSGKYKKVEIKELGELRKEPSL

SEQ ID NO: 371 - protein, 395 aa, Homo sapiens
MWLPRVSSTAVTALLLAQTFLLLFLVSRPGPSSPAGGEARVHVLVLSSWRSGSSFVGQLFNQHPDVFYLMEPAWHVWTTLSQGSAATLHMAVRDLVRSVFLCDMDVFDAYLPWRRNLSDLFQWAVSRALCSPPACSAFPRGAISSEAVCKPLCARQSFTLAREACRSYSHVVLKEVRFFNLQVLYPLLSDPALNLRIVHLVRDPRAVLRSREQTAKALARDNGIVLGTNGTWVEADPGLRVVREVCRSHVRIAEAATLKPPPFLRGRYRLVRFEDLAREPLAEIRALYAFTGLSLTPQLEAWIHNITHGSGPGARREAFKTSSRNALNVSQAWRHALPFAKIRRVQELCAGALQLLGYRPVYSEDEQRNLALDLVLPRGLNGFTWASSTASHPRN

SEQ ID NO: 372 - protein, 782 aa, Homo sapiens
MAPHRPAPALLCALSLALCALSLPVRAATASRGASQAGAPQGRVPEARPNSMVVEHPEFLKAGKEPGLQIWRVEKFDLVPVPTNLYGDFFTGDAYVILKTVQLRNGNLQYDLHYWLGNECSQDESGAAAIFTVQLDDYLNGRAVQHREVQGFESATFLGYFKSGLKYKKGGVASGFKHVVPNEVVVQRLFQVKGRRVVRATEVPVSWESFNNGDCFILDLGNNIHQWCGSNSNRYERLKATQVSKGIRDNERSGRARVHVSEEGTEPEAMLQVLGPKPALPAGTEDTAKEDAANRKLAKLYKVSNGAGTMSVSLVADENPFAQGALKSEDCFILDHGKDGKIFVWKGKQANTEERKAALKTASDFITKMDYPKQTQVSVLPEGGETPLFKQFFKNWRDPDQTDGLGLSYLSSHIANVERVPFDAATLHTSTAMAAQHGMDDDGTGQKQIWRIEGSNKVPVDPATYGQFYGGDSYIILYNYRHGGRQGQIIYNWQGAQSTQDEVAASAILTAQLDEELGGTPVQSRVVQGKEPAHLMSLFGGKPMIIYKGGTSREGGQTAPASTRLFQVRANSAGATRAVEVLPKAGALNSNDAFVLKTPSAAYLWVGTGASEAEKTGAQELLRVLRAQPVQVAEGSEPDGFWEALGGKAAYRTSPRLKDKKMDAHPPRLFACSNKIGRFVIEEVPGELMQEDLATDDVMLLDTWDQVFVWVGKDSQEEEKTEALTSAKRYIETDPANRDRRTPITVVKQGFEPPSFVGWFLGWDDDYWSVDPLDRAMAELAA

SEQ ID NO: 373 - protein, 338 aa, Homo sapiens
MAASQVLGEKINILSGETVKAGDRDPLGNDCPEQDRLPQRSWRQKCASYVLALRPWSFSASLTPVALGSALAYRSHGVLDPRLLVGCAVAVLAVHGAGNLVNTYYDFSKGIDHKKSDDRTLVDRILEPQDVVRFGVFLYTLGCVCAACLYYLSPLKLEHLALIYFGGLSGSFLYTGGIGFKYVALGDLIILITFGPLAVMFAYAIQVGSLAIFPLVYAIPLALSTEAILHSNNTRDMESDREAGIVTLAILIGPTFSYILYNTLLFLPYLVFSILATHCTISLALPLLTIPMAFSLERQFRSQAFNKLPQRTAKLNLLLGLFYVFGIILAPAGSLPKI

SEQ ID NO: 374 - protein, 359 aa, Homo sapiens
MKATIILLLLAQVSWAGPFQQRGLFDFMLEDEASGIGPEVPDDRDFEPSLGPVCPFRCQCHLRVVQCSDLGLDKVPKDLPPDTTLLDLQNNKITEIKDGDFKNLKNLHALILVNNKISKVSPGAFTPLVKLERLYLSKNQLKELPEKMPKTLQELRAHENEITKVRKVTFNGLNQMIVIELGTNPLKSSGIENGAFQGMKKLSYIRIADTNITSIPQGLPPSLTELHLDGNKISRVDAASLKGLNNLAKLGLSFNSISAVDNGSLANTPHLRELHLDNNKLTRVPGGLAEHKYIQVVYLHNNNISVVGSSDFCPPGHNTKKASYSGVSLFSNPVQYWEIQPSTFRCVYVRSAIQLGNYK

SEQ ID NO: 375 - protein, 2098 aa, Homo sapiens
MATDDKTSPTLDSANDLPRSPTSPSHLTHFKPLTPDQDEPPFKSAYSSFVNLFRFNKERAEGGQGEQQPLSGSWTSPQLPSRTQSVRSPTPYKKQLNEELQRRSSALDTRRKAEPTFGGHDPRTAVQLRSLSTVLKRLKEIMEGKSQDSDLKQYWMPDSQCKECYDCSEKFTTFRRRHHCRLCGQIFCSRCCNQEIPGKFMGYTGDLRACTYCRKIALSYAHSTDSNSIGEDLNALSDSACSVSVLDPSEPRTPVGSRKASRNIFLEDDLAWQSLIHPDSSNTPLSTRLVSVQEDAGKSPARNRSASITNLSLDRSGSPMVPSYETSVSPQANRTYVRTETTEDERKILLDSVQLKDLWKKICHHSSGMEFQDHRYWLRTHPNCIVGKELVNWLIRNGHIATRAQAIAIGQAMVDGRWLDCVSHHDQLFRDEYALYRPLQSTEFSETPSPDSDSVNSVEGHSEPSWFKDIKFDDSDTEQIAEEGDDNLANSASPSKRTSVSSFQSTVDSDSAASISLNVELDNVNFHIKKPSKYPHVPPHPADQKEYLISDTGGQQLSISDAFIKESLFNRRVEEKSKELPFTPLGWHHNNLELLREENGEKQAMERLLSANHNHMMALLQQLLHSDSLSSSWRDIIVSLVCQVVQTVRPDVKNQDDDMDIRQFVHIKKIPGGKKFDSVVVNGFVCTKNIAHKKMSSCIKNPKILLLKCSIEYLYREETKFTCIDPIVLQEREFLKNYVQRIVDVRPTLVLVEKTVSRIAQDMLLEHGITLVINVKSQVLERISRMTQGDLVMSMDQLLTKPHLGTCHKFYMQIFQLPNEQTKTLMFFEGCPQHLGCTIKLRGGSDYELARVKEILIFMICVAYHSQLEISFLMDEFAMPPTLMQNPSFHSLIEGRGHEGAVQEQYGGGSIPWDPDIPPESLPCDDSSLLELRIVFEKGEQENKNLPQAVASVKHQEHSTTACPAGLPCAFFAPVPESLLPLPVDDQQDALGSEQPETLQQTVVLQDPKSQIRAFRDPLQDDTGLYVTEEVTSSEDKRKTYSLAFKQELKDVILCISPVITFREPFLLTEKGMRCSTRDYFAEQVYWSPLLNKEFKEMENRRKKQLLRDLSGLQGMNGSIQAKSIQVLPSHELVSTRIAEHLGDSQSLGRMLADYRARGGRIQPKNSDPFAHSKDASSTSSGQSGSKNEGDEERGLILSDAVWSTKVDCLNPINHQRLCVLFSSSSAQSSNAPSACVSPWIVTMEFYGKNDLTLGIFLERYCFRPSYQCPSMFCDTPMVHHIRRFVHGQGCVQIILKELDSPVPGYQHTILTYSWCRICKQVTPVVALSNESWSMSFAKYLELRFYGHQYTRRANAEPCGHSIHHDYHQYFSYNQMVASFSYSPIRLLEVCVPLPKIFIKRQAPLKVSLLQDLKDFFQKVSQVYVAIDERLASLKTDTFSKTREEKMEDIFAQKEMEEGEFKNWIEKMQARLMSSSVDTPQQLQSVFESLIAKKQSLCEVLQAWNNRLQDLFQQEKGRKRPSVPPSPGRLRQGEESKISAMDASPRNISPGLQNGEKEDRFLTTLSSQSSTSSTHLQLPTPPEVMSEQSVGGPPELDTASSSEDVFDGHLLGSTDSQVKEKSTMKAIFANLLPGNSYNPIPFPFDPDKHYLMYEHERVPIAVCEKEPSSIIAFALSCKEYRNALEELSKATQWNSAEEGLPTNSTSDSRPKSSSPIRLPEMSGGQTNRTTETEPQPTKKASGMLSFFRGTAGKSPDLSSQKRETLRGADSAYYQVGQTGKEGTENQGVEPQDEVDGGDTQKKQLINPHVELQFSDANAKFYCRLYYAGEFHKMREVILDSSEEDFIRSLSHSSPWQARGGKSGAAFYATEDDRFILKQMPRLEVQSFLDFAPHYFNYITNAVQQKRPTALAKILGVYRIGYKNSQNNTEKKLDLLVMENLFYGRKMAQVFDLKGSLRNRNVKTDTGKESCDVVLLDENLLKMVRDNPLYIRSHSKAVLRTSIHSDSHFLSSHLIIDYSLLVGRDDTSNELVVGIIDYIRTFTWDKKLEMVVKSTGILGGQGKMPTVVSPELYRTRFCEAMDKYFLMVPDHWTGLGLNC

SEQ ID NO: 376 - protein, 275 aa, Homo sapiens
MPKVFLVKRRSLGVSVRSWDELPDEKRADTYIPVGLGRLLHDPPEDCRSDGGSSSGSGSSSAGEPGGAESSSSPHAPESETPEPGDAEGPDGHLATKQRPVARSKIKFTTGTCSDSVVHSCDLCGKGFRLQRMLNRHLKCHNQVKRHLCTFCGKGFNDTFDLKRHVRTHTGIRPYKCNVCNKAFTQRCSLESHLKKIHGVQQQYAYKQRRDKLYVCEDCGYTGPTQEDLYLHVNSAHPGSSFLKKTSKKLAALLQGKLTSAHQENTSLSEEEERK

SEQ ID NO: 377 - protein, 625 aa, Homo sapiens
MSQESDNNKRLVALVPMPSDPPFNTRRAYTSEDEAWKSYLENPLTAATKAMMSINGDEDSAAALGLLYDYYKVPRDKRLLSVSKASDSQEDQEKRNCLGTSEAQSNLSGGENRVQVLKTVPVNLSLNQDHLENSKREQYSISFPESSAIIPVSGITVVKAEDFTPVFMAPPVHYPRGDGEEQRVVIFEQTQYDVPSLATHSAYLKDDQRSTPDSTYSESFKDAATEKFRSASVGAEEYMYDQTSSGTFQYTLEATKSLRQKQGEGPMTYLNKGQFYAITLSETGDNKCFRHPISKVRSVVMVVFSEDKNRDEQLKYWKYWHSRQHTAKQRVLDIADYKESFNTIGNIEEIAYNAVSFTWDVNEEAKIFITVNCLSTDFSSQKGVKGLPLMIQIDTYSYNNRSNKPIHRAYCQIKVFCDKGAERKIRDEERKQNRKKGKGQASQTQCNSSSDGKLAAIPLQKKSDITYFKTMPDLHSQPVLFIPDVHFANLQRTGQVYYNTDDEREGGSVLVKRMFRPMEEEFGPVPSKQMKEEGTKRVLLYVRKETDDVFDALMLKSPTVKGLMEAISEKYGLPVEKIAKLYKKSKKGILVNMDDNIIEHYSNEDTFILNMESMVEGFKVTLMEI

SEQ ID NO: 378 - DNA, 2046 bp, Homo sapiens
  source 1..2046: mol_type = genomic DNA
atgtccaaggggatcctgcaggtgcatcctccgatctgcgactgcccgggctgccgaatatcctccccggtgaaccgggggcggctggcagacaagaggacagtcgccctgcctgccgcccggaacctgaagaaggagcgaactcccagcttctctgccagcgatggtgacagcgacgggagtggccccacctgtgggcggcggccaggcttgaagcaggaggatggtccgcacatccgtatcatgaagagaagagtccacacccactgggacgtgaacatctctttccgagaggcgtcctgcagccaggacggcaaccttcccaccctcatatccagcgtccaccgcagccgccacctcgttatgcccgagcatcagagccgctgtgaattccagagaggcagcctggagattggcctgcgacccgccggtgacctgttgggcaagaggctgggccgctccccccgtatcagcagcgactgcttttcagagaagagggcacgaagcgaatcgcctcaagaggcgctgctgctgccgcgggagctggggcccagcatggccccggaggaccattaccgccggcttgtgtcagcactgagcgaggccagcacctttgaggaccctcagcgcctctaccacctgggcctccccagccacggtgaggacccaccctggcatgatccccctcatcacctccccagccacgatctcctgagggtccggcaggaggtggcggctgcagctctgaggggccccagtggcctggaagcccacctgccctcctccacggcaggtcagcgtcggaagcagggcctggctcagcaccgggagggcgccgccccagctgccgccccgtccttctcggagagggagctgcctcagccgccccccttgctgtcgccgcagaatgcccctcacgtcgccctgggcccccatctcaggccccccttcctgggggtgccctcggctctgtgccagaccccaggctacggcttcctgccccccgcgcaggcggagatgttcgcctggcagcaggagctcctgcggaagcagaacctggcccggctggagctgcccgccgacctcctgcggcagaaggagctggagagcgcgcgcccacagctgctggcgcccgagaccgccctgcgccccaacgacggcgccgaggagctgcagcggcgcggggccctgctggtgctgaaccacggcgcggcgccactgctggccctgcccccccaggggcccccgggctccggaccccccaccccgtcccgggactctgcccggcgagccccccggaaggggggtcccggccctgcctcagcgcggcccagcgagtccaaggagatgacgggggctaggctctgggcacaagatggctcggaagacgagccccccaaagactcggacggagaggaccccgagacggcagctgttgggtgcagggggcccactccgggccaagctccagctggaggggccggcgccgaggggaaggggcttttcccagggtccacactgcccctgggcttcccttatgccgtcagcccctacttccacacaggcgcggtagggggactctccatggatggggaggaggccccagcccctgaggacgtcaccaagtggaccgtggatgacgtctgcagcttcgtggggggcctgtctggctgtggagagtacactcgggtcttcagggagcaggggatcgacggggagaccctgccactgctgacggaggagcacctgctgaccaacatggggctgaagctggggcccgccctcaagatccgggcccaggtggccaggcgcctgggccgagttttctacgtggccagcttccccgtggctctgccactgcagccaccaaccctgcgggccccggagcgagaactcggcacaggagagcagcccttgtcccccacgacggccacgtccccctatggagggggccacgcccttgccggtcaaacttcacccaagcaggagaatgggaccttggctctacttccaggggcccccgacccttcccagcctctgtgttga

SEQ ID NO: 379 - DNA, 4281 bp, Homo sapiens
  source 1..4281: mol_type = genomic DNA
atgaacgactggcacaggatcttcacccaaaacgtgcttgtccctccccacccacagagagcgcgccagccttggaaggaatccacggcattccagtgtgtcctcaagtggctggacggaccggtaattaggcagggcgtgctggaggtactgtcagaggttgaatgccatctgcgagtgtctttctttgatgtcacctaccggcacttctttgggaggacgtggaaaaccacagtgaagccgacgaagagaccgccgtccaggatcgtctttaatgagcccttgtattttcacacatccctaaaccaccctcatatcgtggctgtggtggaagtggtcgctgagggcaagaaacgggatgggagcctccagacattgtcctgtgggtttggaattcttcggatcttcagcaaccagccggactctcctatctctgcttcccaggacaaaaggttgcggctgtaccatggcacccccagagccctcctgcacccgcttctccaggaccccgcagagcaaaacagacacatgaccctcattgagaactgcagcctgcagtacacgctgaagccacacccggccctggagcctgcgttccaccttcttcctgagaaccttctggtgtctggtctgcagcagatacctggcctgcttccagctcatggagaatccggcgacgctctccgaaagcctcgcctccagaagcccatcacggggcacttggatgacttattcttcaccctgtacccctccctggagaagtttgaggaagagctgctggagctccacgtccaggaccacttccaggagggatgtggcccactggacggtggtgccctggagatcctggagcggcgcctgcgtgtgggcgtgcacaatggtctgggcttcgtgcagaggccgcaggtcgttgtactggtgcctgagatggatgtggccttgacgcgctcagctagcttcagcaggaaagtggtctcctcttccaagaccagctccgggagccaagctctggttttgagaagccgcctccgcctcccagagatggtcggccaccctgcatttgcggtcatcttccagctggagtacgtgttcagcagccctgcaggagtggacggcaatgcagcttcggtcacctctctgtccaacctggcatgcatgcacatggtccgctgggctgtttggaaccccttgctggaagctgattctggaagggtgaccctgcctctgcagggtgggatccagcccaacccctcgcactgtctggtctacaaggtaccctcagccagcatgagctctgaagaggtgaagcaggtggagtcgggtacactccggttccagttctcgctgggctcagaagaacacctggatgcacccacggagcctgtcagtggccccaaagtggagcggcggccttccaggaaaccacccacgtccccttcgagcccgccagcgccagtacctcgagttctcgctgccccgcagaactcacctgtgggaccagggttgtcaatttcccagctggcggcctccccgcggtccccgactcagcactgcttggccaggcctacttcacagctaccccatggctctcaggcctccccggcccaggcacaggagttcccgttggaggccggtatctcccacctggaagccgacctgagccagacctccctggtcctggaaacatccattgccgaacagttacaggagctgccgttcacgcctttgcatgcccctattgttgtgggaacccagaccaggagctctgcagggcagccctcgagagcctccatggtgctcctgcagtcctccggctttcccgagattctggatgccaataaacagccagccgaggctgtcagcgctacagaacctgtgacgtttaaccctcagaaggaagaatcagattgtctacaaagcaacgagatggtgctacagtttcttgcctttagcagagtggcccaggactgccgaggaacatcatggccaaagactgtgtatttcaccttccagttctaccgcttcccacccgcaacgacgccacgactgcagctggtccagctggatgaggccggccagcccagctctggcgccctgacccacatcctcgtgcctgtgagcagagatggcacctttgatgctgggtctcctggcttccagctgaggtacatggtgggccctgggttcctgaagccaggtgagcggcgctgctttgcccgctacctggccgtgcagaccctgcagattgacgtctgggacggagactccctgctgctcatcggatctgctgccgtccagatgaagcatctcctccgccaaggccggccggctgtgcaggcctcccacgagcttgaggtcgtggcaactgaatacgagcaggacaacatggtggtgagtggagacatgctggggtttggccgcgtcaagcccatcggcgtccactcggtggtgaagggccggctgcacctgactttggccaacgtgggtcacccgtgtgaacagaaagtgagaggttgtagcacattgccaccgtccagatctcgggtcatctcaaacgatggagccagccgcttctctggaggcagcctcctcacgactggaagctcaaggcgaaaacacgtggtgcaagcacagaagctggcggacgtggacagtgagctggctgccatgctactgacccatgcccggcagggcaaggggccccaggacgtcagccgcgagtcggatgccacccgcaggcgtaagctggagcggatgaggtctgtgcgcctgcaggaggccgggggagacttgggccggcgcgggacgagcgtgttggcgcagcagagcgtccgcacacagcacttgcgggacctacaggtcatcgccgcctaccgggaacgcacgaaggccgagagcatcgccagcctgctgagcctggccatcaccacggagcacacgctccacgccacgctgggggtcgccgagttctttgagtttgtgcttaagaacccccacaacacacagcacacggtgactgtggagatcgacaaccccgagctcagcgtcatcgtggacagtcaggagtggagggacttcaagggtgctgctggcctgcacacaccggtggaggaggacatgttccacctgcgtggcagcctggccccccagctctacctgcgcccccacgagaccgcccacgtccccttcaagttccagagcttctctgcagggcagctggccatggtgcaggcctctcctgggttgagcaacgagaagggcatggacgccgtgtcaccttggaagtccagcgcagtgcccactaaacacgccaaggtcttgttccgagcgagtggtggcaagcccatcgccgtgctctgcctgactgtggagctgcagccccacgtggtggaccaggtcttccgcttctatcacccggagctctccttcctgaagaaggccatccgcctgccgccctggcacacatttccaggtgctccggtgggaatgcttggtgaggaccccccagtccatgttcgctgcagcgacccgaacgtcatctgtgagacccagaatgtgggccccggggaaccacgggacatatttctgaaggtggccagtggtccaagcccggagatcaaagacttctttgtcatcatttactcggatcgctggctggcgacacccacacagacgtggcaggtctacctccactccctgcagcgcgtggatgtctcctgcgtcgcaggccagctgacccgcctgtcccttgtccttcgggggacacagacagtgaggaaagtgagagctttcacctctcatccccaggagctgaagacagaccccaaaggtgtcttcgtgctgccgcctcgtggggtgcaggacctgcatgttggcgtgaggccccttagggccggcagccgctttgtccatctcaacctggtggacgtggattgccaccagctggtggcctcctggctcgtgtgcctctgctgccgccagccgctcatctccaaggcctttgagatcatgttggctgcgggcgaagggaagggtgtcaacaagaggatcacctacaccaacccctacccctcccggaggacattccacctgcacagcgaccacccggagctgctgcggttcagagaggactccttccaggtcgggggtggagagacctacaccatcggcttgcagtttgcgcctagtcagagagtgggtgaggaggagatcctgatctacatcaatgaccatgaggacaaaaacgaagaggcattttgcgtgaaggtcatctaccagtga

SEQ ID NO: 380 - DNA, 2565 bp, Homo sapiens
  source 1..2565: mol_type = genomic DNA
atggccctggagcaggcgctgcaggcggcgcggcagggcgagctggacgtgctgaggtcgctgcacgccgcaggcctcctggggccctcgctgcgcgacccgctggacgcgctgcccgtgcaccacgcggcccgcgctgggaagctgcactgtctgcgcttcctggtggaggaagccgccctccccgccgcggcccgcgcccgcaacggcgccacaccggcccacgacgcctccgccaccggccacctcgcctgcctgcagtggctgctgtcgcagggcggctgcagagtgcaggacaaagacaattctggtgccacagtcttgcatctggctgcccgcttcggccaccccgaggtggtgaactggctcttgcatcatggcggtggggaccccaccgcggccacagacatgggcgccctgcctatccactacgctgccgccaaaggagacttcccctccctgaggcttctcgtcgagcactaccctgagggagtgaatgcccaaaccaagaacggtgccacgcccctgtacctggcgtgccaggagggccacctggaggtgacccagtacctggtgcaggaatgcggcgcagacccgcacgcgcgcgcccacgacggcatgaccccgctgcacgccgcggcgcagatgggccacagcccagtcatcgtgtggttggtgagctgcaccgacgtgagcctgtccgagcaggacaaagacggcgccaccgccatgcacttcgcggcgagccgcggccacaccaaggtgctcagctggctgctgctgcacggcggggagatctcggctgacctgtggggcgggaccccgctgcacgacgccgccgagaacggggagctagagtgctgccagatcctggtagtgaacggcgcggagctggacgtccgcgaccgcgacgggtacacggccgccgacctgtcggacttcaacggccacagccactgcacccgctacctgcgcacggtggagaacctgagcgtggagcaccgcgtgctttcccgggatccatccgcagagctggaggctaagcagccggattcaggcatgtcctcacccaataccacggtgtcggtccagccgctgaactttgacctcagctcgcctaccagcaccctctccaactacgactcctgctcctccagccactccagcatcaagggccagcaccctccatgtgggctttccagcgctagagctgcagacatacagagctacatggacatgctgaacccggagctgggcctgcctcggggcacgattgggaagcccacacccccaccacccccacccagcttccccccgccacccccgcccccaggcacccaactgcccccacccccacctggctacccagctcccaagcctcctgtaggaccacaggcagctgacatctacatgcagaccaagaacaaactccgccacgtggagacagaggccctcaagaaggagctgagctcctgtgacggccacgacgggctgcggaggcaggactccagccgcaagccccgcgccttcagcaagcagcccagcacgggggactactaccggcagctgggccgctgccccggcgagacgctggccgcacgcccgggcatggcgcacagcgaggaggtgcgtgcccgccagcccgcgcgcgccggctgcccgcgcctcggccctgccgcccgcggctcactcgaaggcccctccgctcccccgcaggcggcgctgcttcctgggaaccatgttcctaacggctgcgccgcggaccccaaggcgtccagggagctgccaccgccgcccccaccgccgccgccgcccctgccggaggccgcgagttcgccaccgccggccccgcctctgcccctcgagagcgctggccctggctgcgggcagcgccgctcctcctcgtccaccggcagcaccaagtctttcaacatgatgtccccgacgggcgacaactcggagctactggctgagattaaggcaggcaagagcctgaagccgacgccccagagcaaggggctgaccacagtgttctcaggcatcgggcagccggccttccagcccgattcgccgctgccttctgtgtcacctgcactgtcaccagtccggagccccacaccgccagctgcggggtttcagccgctgctcaatggaagcttggttcccgtgccgcccactactcctgcgccgggagtgcagctggacgtggaggctctcatccccacgcacgatgagcagggccggcccatccccgagtggaagcgccaggtgatggtgcgcaagatgcagctgaagatgcaggaggaggaggagcagaggcggaaggaggaggaggaggaggcccggctggccagcatgcccgcctggaggcgggacctcctgcggaagaagctggaagaagagagggagcagaagcggaaagaggaggagcgacagaagcaggaggagctgcggcgggagaaggaacagtcagagaagctgcggacgctgggctacgatgagagcaagctggcgccctggcagcgacaggtcatcctgaagaagggggacatcgctaagtactag

SEQ ID NO: 381 - DNA, 840 bp, Homo sapiens
  source 1..840: mol_type = genomic DNA
atggaaaattccgagaagactgaagtggttctccttgcttgtggttcattcaatcccatcaccaacatgcacctcaggttgtttgagctggccaaggactacatgaatggaacaggaaggtacacagttgtcaaaggcatcatctctcctgttggtgatgcctacaagaagaaaggactcattcctgcctatcaccgggtcatcatggcagaacttgctaccaagaattctaaatgggtggaagttgatacatgggaaagtcttcagaaggagtggaaagagactctgaaggtgctaagacaccatcaagagaaattggaggctagtgactgtgatcaccagcagaactcacctactctagaaaggcctggaaggaagaggaagtggactgaaacacaagattctagtcaaaagaaatccctagagccaaaaacaaaagctgtgccaaaggtcaagctgctgtgtggggcagatttattggagtcctttgctgttcccaatttgtggaagagtgaagacatcacccaaatcgtggccaactatgggctcatatgtgttactcgggctggaaatgatgctcagaagtttatctatgaatcggatgtgctgtggaaacaccggagcaacattcacgtggtgaatgaatggatcgctaatgacatctcatccacaaaaatccggagagccctcagaaggggccagagcattcgctacttggtaccagatcttgtccaagaatacattgaaaagcataatttgtacagctctgagagtgaagacaggaatgctggggtcatcctggcccctttgcagagaaacactgcagaagctaagacatag

SEQ ID NO: 382 - DNA, 2274 bp, Homo sapiens
  source 1..2274: mol_type = genomic DNA
atgtccctgctcttctctcgatgcaactctatcgtcacagtcaagaaaaataagagacacatggctgaggtgaatgcatccccacttaagcactttgtcactgccaagaagaagatcaatggcatttttgagcagctgggggcctacatccaggagagcgccaccttccttgaagacacgtacaggaatgcagaactggaccccgttaccacagaagaacaggttctggacgtcaaaggttacctatccaaagtgagaggcatcagtgaggtgctggctcggaggcacatgaaagtggctttttttggccggacgagcaatgggaagagcaccgtgatcaatgccatgctctgggacaaagttctgccctctgggattggccacaccaccaattgcttcctgcgggtagagggcacagatggccatgaggcctttctccttaccgagggctcagaggaaaagaggagtgccaagactgtgaaccagctggcccatgccctccaccaggacaagcagctccatgccggcagcctagtgagtgtgatgtggcccaactctaagtgcccacttctgaaggatgacctcgttttgatggacagccctggtattgatgtcaccacagagctggacagctggattgacaagttttgtctggatgctgatgtgtttgtgctggtggccaactcagagtccaccctgatgcagacggaaaagcacttcttccacaaggtgagtgagcgtctctcccggccaaacatcttcatcctgaacaaccgctgggatgcatctgcctcagagcccgagtacatggaggaggtgcggcggcagcacatggagcgttgtaccagcttcctggtggatgagctgggcgtggtggatcgatcccaggccggggaccgcatcttctttgtgtctgctaaggaggtgctcaacgccaggattcagaaagcccagggcatgcctgaaggagggggcgctctcgcagaaggctttcaagtgaggatgtttgagtttcagaattttgagaggagatttgaggagtgcatctcccagtctgcagtgaagaccaagtttgagcagcacacggtccgggccaagcagattgcagaggcggttcgactcatcatggactccctgcacatggcggctcgggagcagcaggtttactgcgaggaaatgcgtgaagagcggcaagaccgactgaaatttattgacaaacagctggagctcttggctcaagactataagctgcgaattaagcagattacggaggaagtggagaggcaggtgtcgactgcaatggccgaggagatcaggcgcctctctgtactggtggacgattaccagatggacttccacccttctccagtagtcctcaaggtttataagaatgagctgcaccgccacatagaggaaggactgggtcgaaacatgtctgaccgctgctccacggccatcaccaactccctgcagaccatgcagcaggacatgatagatggcttgaaacccctccttcctgtgtctgtgcggagtcagatagacatgctggtcccacgccagtgcttctccctcaactatgacctaaactgtgacaagctgtgtgctgacttccaggaagacattgagttccatttctctctcggatggaccatgctggtgaataggttcctgggccccaagaacagccgtcgggccttgatgggctacaatgaccaggtccagcgtcccatccctctgacgccagccaaccccagcatgcccccactgccacagggctcgctcacccaggaggagttcatggtttccatggttaccggcctggcctccttgacatccaggacctccatgggcattcttgttgttggaggagtggtgtggaaggcagtgggctggcggctcattgccctctcctttgggctctatggcctcctctacgtctatgagcgtctgacctggaccaccaaggccaaggagagggccttcaagcgccagtttgtggagcatgccagcgagaagctgcagcttgtcatcagctacactggctccaactgcagccaccaagtccagcaggaactgtctgggacctttgctcatctgtgtcagcaagttgacgtcacccgggagaacctggagcaggaaattgccgccatgaacaagaaaattgaggttcttgactcacttcagagcaaagcaaagctgctcaggaataaagccggttggttggacagtgagctcaacatgttcacacaccagtacctgcagcccagcagatag

SEQ ID NO: 383 - DNA, 2982 bp, Homo sapiens
  source 1..2982: mol_type = genomic DNA
atggcggctgagtgggcttctcgtttctggctttgggctacgctgctgattcctgcggccgcggtctacgaagaccaagtgggcaagtttgattggagacagcaatatgttgggaaggtcaagtttgcctccttggaattttcccctggatccaagaagttggttgtagccacagagaagaatgtgattgcagcattaaattcccgaactggggagatcttgtggcgccatgttgacaagggcacggcagaaggggctgtggatgccatgctgctgcacggacaggatgtgatcactgtgtccaatggaggccgaatcatgcgttcctgggagactaacatcgggggcctgaactgggagataaccctggacagtggcagtttccaggcacttgggctggttggcctgcaggagtctgtaaggtacatcgcagtcctgaagaagactacacttgccctccatcacctctccagtgggcacctcaagtgggtggaacatctcccagaaagtgacagcatccactaccagatggtgtattcttacggctctggggtggtgtgggccctcggagttgttcccttcagccatgtgaacattgtcaagtttaatgtggaagatggagagattgttcagcaggttagggtttcaactccgtggctgcagcacctgtctggagcctgtggtgtggtggatgaggctgtcctggtgtgtcctgacccgagctcacgttccctccaaactttggctctggagacggaatgggagttgagacagatcccactgcagtctctcgacttagaatttggaagtggattccaaccccgggtcctgcctacccagcccaacccagtggacgcttcccgggcccagttcttcctgcacttgtccccaagccactatgctctgctgcagtaccattatggaacgctgagtttgcttaaaaacttcccacagactgccctagtgagctttgccaccactggggagaagacggtggctgcagtcatggcctgtcggaatgaagtgcagaaaagtagcagttctgaagatgggtcaatggggagcttttcggagaagtctagttcaaaggactctctggcttgcttcaatcagacctacaccattaacctatacctcgtggagacaggtcggcggctgctggacaccacgataacatttagcctggaacagagcggcactcggcctgagcggctgtatatccaggtgttcttgaagaaggatgactcagtgggctaccgggctttggtgcagacagaggatcatctgctacttttcctgcagcagttggcagggaaggtggtgctgtggagccgtgaggagtccctggcagaagtggtgtgcctagagatggtggacctccccctgactggggcacaggccgagctggaaggagaatttggcaaaaaggcagatggcttgctggggatgttcctgaaacgcctctcgtctcagcttatcctgctgcaagcatggacttcccacctctggaaaatgttttatgatgctcggaagccccggagtcagattaagaatgagatcaacattgacaccctggccagagatgaattcaacctccagaagatgatggtgatggtaacagcctcaggcaagctttttggcattgagagcagctctggcaccatcctgtggaaacagtatctacccaatgtcaagccagactcctcctttaaactgatggtccagagaactactgctcatttcccccatcccccacagtgcaccctgctggtgaaggacaaggagtcgggaatgagttctctgtatgtcttcaatcccatttttgggaagtggagtcaggtagctcccccagtgctgaagcgccccatcttgcagtccttgcttctcccagtcatggatcaagactacgccaaggtgttgctgttgatagatgatgaatacaaggtcacagcttttccagccactcggaatgtcttgcgacagctacatgagcttgccccttccatcttcttctatttggtggatgcagagcagggacggctgtgtggatatcggcttcgaaaggatctcaccactgagctgagttgggagctgaccattcccccagaagtacagcggatcgtcaaggtgaaggggaaacgcagcagtgagcacgttcattcccagggccgtgtgatgggggaccgcagtgtgctctacaagagcctgaaccccaacctgctggccgtggtgacagagagcacagacgcgcaccatgagcgcacctttattggcatcttcctcattgatggcgtcactgggcgtatcattcactcctctgtgcagaagaaagccaaaggccctgtccatatcgtgcattcagagaactgggtggtgtaccagtactggaacaccaaggctcggcgcaacgagtttaccgtactggagctctatgagggcactgagcaatacaacgccaccgccttcagctccctggaccgcccccagctgccccaggtcctccagcagtcctatatcttcccgtcctccatcagtgccatggaggccaccatcaccgaacggggcatcaccagccgacacctgctgattggactaccttctggagcaattctttcccttcctaaggctttgctggatccccgccgccccgagatcccaacagaacaaagcagagaggagaacttaatcccgtattctccagatgtacagatacacgcagagcgattcatcaactataaccagacagtttctcgaatgcgaggtatctacacagctccctcgggtctggagtccacttgtttggttgtggcctatggtttggacatttaccaaactcgagtctacccatccaagcagtttgacgttctgaaggatgactatgactacgtgttaatcagcagcgtcctctttggcctggtttttgccaccatgatcactaagagactggcacaggtgaagctcctgaatcgggcctggcgataa

SEQ ID NO: 384 - DNA, 417 bp, Homo sapiens
  source 1..417: mol_type = genomic DNA
atgaaaggcctcctcccactggcttggttcctggcttgtagtgtgcctgctgtgcaaggaggcttgctggacctaaaatcaatgatcgagaaggtgacagggaagaacgccctgacaaactacggcttctacggctgttactgcggctggggcggccgaggaacccccaaggatggcaccgattggtgctgttgggcgcatgaccactgctatgggcggctggaggagaagggctgcaacattcgcacacagtcctacaaatacagattcgcgtggggcgtggtcacctgcgagcccgggcccttctgccatgtgaacctctgtgcctgtgaccggaagctcgtctactgcctcaagagaaacctacggagctacaacccacagtaccaatactttcccaacatcctctgctcctag

SEQ ID NO: 385 - DNA, 1005 bp, Homo sapiens
  source 1..1005: mol_type = genomic DNA
atgtcatggatcaaggaaggagagctgtcactttgggagcggttctgtgccaacatcataaaggcaggcccaatgccgaaacacattgcattcataatggacgggaaccgtcgctatgccaagaagtgccaggtggagcggcaggaaggccactcacagggcttcaacaagctagctgagactctgcggtggtgtttgaacctgggcatcctagaggtgacagtctacgcattcagcattgagaacttcaaacgctccaagagtgaggtagacgggcttatggatctggcccggcagaagttcagccgcttgatggaagaaaaggagaaactgcagaagcatggggtgtgtatccgggtcctgggcgatctgcacttgttgcccttggatctccaggagctgattgcacaagctgtacaggccacgaagaactacaacaagtgtttcctgaatgtctgttttgcatacacatcccgtcatgagatcagcaatgctgtgagagagatggcctggggggtggagcaaggcctgttggatcccagtgatatctctgagtctctgcttgataagtgcctctataccaaccgctctcctcatcctgacatcttgatacggacttctggagaagtgcggctgagtgacttcttgctatggcagacctctcactcctgcctggtgttccaacccgttctgtggccagagtatacattttggaacctcttcgaggccatcctgcagttccagatgaaccatagcgtgcttcagcagaaggcccgagacatgtatgcagaggagcggaagaggcagcagctggagagggaccaggctacagtgacagagcagctgctgcgagaggggctccaagccagtggggacgcccagctccgaaggacacgcttgcacaaactctcggccagacgggaagagcgagtccaaggcttcctgcaggccttggaactcaagcgagctgactggctggcccgtctgggcactgcatcagcctga

SEQ ID NO: 386 - DNA, 921 bp, Homo sapiens
  source 1..921: mol_type = genomic DNA
atggcgtcgcccggctgcctgtggctcttggctgtggctctcctgccatggacctgcgcttctcgggcgctgcagcatctggacccgccggcgccgctgccgttggtgatctggcatgggatgggagacagctgttgcaatcccttaagcatgggtgctattaaaaaaatggtggagaagaaaatacctggaatttacgtcttatctttagagattgggaagaccctgatggaggacgtggagaacagcttcttcttgaatgtcaattcccaagtaacaacagtgtgtcaggcacttgctaaggatcctaaattgcagcaaggctacaatgctatgggattctcccagggaggccaatttctgagggcagtggctcagagatgcccttcacctcccatgatcaatctgatctcggttgggggacaacatcaaggtgtttttggactccctcgatgcccaggagagagctctcacatctgtgacttcatccgaaaaacactgaatgctggggcgtactccaaagttgttcaggaacgcctcgtgcaagccgaatactggcatgaccccataaaggaggatgtgtatcgcaaccacagcatcttcttggcagatataaatcaggagcggggtatcaatgagtcctacaagaaaaacctgatggccctgaagaagtttgtgatggtgaaattcctcaatgattccattgtggaccctgtagattcggagtggtttggattttacagaagtggccaagccaaggaaaccattcccttacaggagacctccctgtacacacaggaccgcctggggctaaaggaaatggacaatgcaggacagctagtgtttctggctacagaaggggaccatcttcagttgtctgaagaatggttttatgcccacatcataccattccttggatga

SEQ ID NO: 387 - DNA, 840 bp, Homo sapiens
  source 1..840: mol_type = genomic DNA
atggaggctgttgtgaacttgtaccaagaggtgatgaagcacgcagatccccggatccagggctaccctctgatggggtcccccttgctaatgacctccattctcctgacctacgtgtacttcgttctctcacttgggcctcgcatcatggctaatcggaagcccttccagctccgtggcttcatgattgtctacaacttctcactggtggcactctccctctacattgtctatgagttcctgatgtcgggctggctgagcacctatacctggcgctgtgaccctgtggactattccaacagccctgaggcacttaggatggttcgggtggcctggctcttcctcttctccaagttcattgagctgatggacacagtgatctttattctccgaaagaaagacgggcaggtgaccttcctacatgtcttccatcactctgtgcttccctggagctggtggtggggggtaaagattgccccgggaggaatgggctctttccatgccatgataaactcttccgtgcatgtcataatgtacctgtactacggattatctgcctttggccctgtggcacaaccctacctttggtggaaaaagcacatgacagccattcagctgatccagtttgtcctggtctcactgcacatctcccagtactactttatgtccagctgtaactaccagtacccagtcattattcacctcatctggatgtatggcaccatcttcttcatgctgttctccaacttctggtatcactcttataccaagggcaagcggctgccccgtgcacttcagcaaaatggagctccaggtattgccaaggtcaaggccaactga

SEQ ID NO: 388 - DNA, 1983 bp, Homo sapiens
  source 1..1983: mol_type = genomic DNA
atggacgactggaagcccagccccctcatcaagccctttggggctcggaagaagcggagctggtaccttacctggaagtataaactgacaaaccagcgggccctgcggagattctgtcagacaggggccgtgcttttcctgctggtgactgtcattgtcaatatcaagttgatcctggacactcggcgagccatcagtgaagccaatgaagacccagagccagagcaagactatgatgaggccctaggccgcctggagcccccacggcgcagaggcagtggtccccggcgggtcctggacgtagaggtgtattcaagtcgcagcaaagtatatgtggcagtggatggcaccacggtgctggaggatgaggcccgggagcagggccggggcatccatgtcattgtcctcaaccaggccacgggccacgtgatggcaaaacgtgtgtttgacacgtactcacctcatgaggatgaggccatggtgctattcctcaacatggtagcgcccggccgagtgctcatctgcactgtcaaggatgagggctccttccacctcaaggacacagccaaggctctgctgaggagcctgggcagccaggctggccctgccctgggctggagggacacatgggccttcgtgggacgaaaaggaggtcctgtcttcggggagaaacattctaaatcacctgccctctcttcctggggggacccagtcctgctgaagacagatgtgccattgagctcagcagaagaggcagagtgccactgggcagacacagagctgaaccgtcgccgccggcgcttctgcagcaaagttgagggctatggaagtgtatgcagctgcaaggaccccacacccatcgagttcagccctgacccactcccagacaacaaggtcctcaatgtgcctgtggctgtcattgcagggaaccgacccaattacctgtacaggatgctgcgctctctgctttcagcccagggggtgtctcctcagatgataacagttttcattgacggctactatgaggaacccatggatgtggtggcactgtttggtctgaggggcatccagcatactcccatcagcatcaagaatgcccgcgtgtctcagcactacaaggccagcctcactgccactttcaacctgtttccggaggccaagtttgctgtggttctggaagaggacctggacattgctgtggattttttcagtttcctgagccaatccatccacctactggaggaggatgacagcctgtactgcatctctgcctggaatgaccaggggtatgaacacacggctgaggacccagcactactgtaccgtgtggagaccatgcctgggctgggctgggtgctcaggaggtccttgtacaaggaggagcttgagcccaagtggcctacaccggaaaagctctgggattgggacatgtggatgcggatgcctgaacaacgccggggccgagagtgcatcatccctgacgtttcccgatcctaccactttggcatcgtcggcctcaacatgaatggctactttcacgaggcctacttcaagaagcacaagttcaacacggttccaggtgtccagctcaggaatgtggacagtctgaagaaagaagcttatgaagtggaagttcacaggctgctcagtgaggctgaggttctggaccacagcaagaacccttgtgaagactctttcctgccagacacagagggccacacctacgtggcctttattcgaatggagaaagatgatgacttcaccacctggacccagcttgccaagtgcctccatatctgggacctggatgtgcgtggcaaccatcggggcctgtggagattgtttcggaagaagaaccacttcctgatggtgggggtcccggcttccccctactcagtgaagaagccaccctcagtcaccccaattttcctggagccacccccaaaggaggagggagccccaggagccccagaacagacatga

SEQ ID NO: 389 - DNA, 1602 bp, Homo sapiens
  source 1..1602: mol_type = genomic DNA
atgtctatccaggttgagcatcctgctggtggttacaagaaactgtttgaaactgtggaggaactgtcctcgccgctcacagctcatgtaacaggcaggatccccctctggctcaccggcagtctccttcgatgtgggccaggactctttgaagttggatctgagccattttaccacctgtttgatgggcaagccctcctgcacaagtttgactttaaagaaggacatgtcacataccacagaaggttcatccgcactgatgcttacgtacgggcaatgactgagaaaaggatcgtcataacagaatttggcacctgtgctttcccagatccctgcaagaatatattttccaggtttttttcttactttcgaggagtagaggttactgacaatgcccttgttaatgtctacccagtgggggaagattactacgcttgcacagagaccaactttattacaaagattaatccagagaccttggagacaattaagcaggttgatctttgcaactatgtctctgtcaatggggccactgctcacccccacattgaaaatgatggaaccgtttacaatattggtaattgctttggaaaaaatttttcaattgcctacaacattgtaaagatcccaccactgcaagcagacaaggaagatccaataagcaagtcagagatcgttgtacaattcccctgcagtgaccgattcaagccatcttacgttcatagttttggtctgactcccaactatatcgtttttgtggagacaccagtcaaaattaacctgttcaagttcctttcttcatggagtctttggggagccaactacatggattgttttgagtccaatgaaaccatgggggtttggcttcatattgctgacaaaaaaaggaaaaagtacctcaataataaatacagaacttctcctttcaacctcttccatcacatcaacacctatgaagacaatgggtttctgattgtggatctctgctgctggaaaggatttgagtttgtttataattacttatatttagccaatttacgtgagaactgggaagaggtgaaaaaaaatgccagaaaggctccccaacctgaagttaggagatatgtacttcctttgaatattgacaaggctgacacaggcaagaatttagtcacgctccccaatacaactgccactgcaattctgtgcagtgacgagactatctggctggagcctgaagttctcttttcagggcctcgtcaagcatttgagtttcctcaaatcaattaccagaagtattgtgggaaaccttacacatatgcgtatggacttggcttgaatcactttgttccagataggctctgtaagctgaatgtcaaaactaaagaaacttgggtttggcaagagcctgattcatacccatcagaacccatctttgtttctcacccagatgccttggaagaagatgatggtgtagttctgagtgtggtggtgagcccaggagcaggacaaaagcctgcttatctcctgattctgaatgccaaggacttaagtgaagttgcccgggctgaagtggagattaacatccctgtcacctttcatggactgttcaaaaaatcttga

SEQ ID NO: 390 - DNA, 6822 bp, Homo sapiens
  source 1..6822: mol_type = genomic DNA
atgggcttcgtgagacagatacagcttttgctctggaagaactggaccctgcggaaaaggcaaaagattcgctttgtggtggaactcgtgtggcctttatctttatttctggtcttgatctggttaaggaatgccaacccactctacagccatcatgaatgccatttccccaacaaggcgatgccctcagcaggaatgctgccgtggctccaggggatcttctgcaatgtgaacaatccctgttttcaaagccccaccccaggagaatctcctggaattgtgtcaaactataacaactccatcttggcaagggtatatcgagattttcaagaactcctcatgaatgcaccagagagccagcaccttggccgtatttggacagagctacacatcttgtcccaattcatggacaccctccggactcacccggagagaattgcaggaagaggaatacgaataagggatatcttgaaagatgaagaaacactgacactatttctcattaaaaacatcggcctgtctgactcagtggtctaccttctgatcaactctcaagtccgtccagagcagttcgctcatggagtcccggacctggcgctgaaggacatcgcctgcagcgaggccctcctggagcgcttcatcatcttcagccagagacgcggggcaaagacggtgcgctatgccctgtgctccctctcccagggcaccctacagtggatagaagacactctgtatgccaacgtggacttcttcaagctcttccgtgtgcttcccacactcctagacagccgttctcaaggtatcaatctgagatcttggggaggaatattatctgatatgtcaccaagaattcaagagtttatccatcggccgagtatgcaggacttgctgtgggtgaccaggcccctcatgcagaatggtggtccagagacctttacaaagctgatgggcatcctgtctgacctcctgtgtggctaccccgagggaggtggctctcgggtgctctccttcaactggtatgaagacaataactataaggcctttctggggattgactccacaaggaaggatcctatctattcttatgacagaagaacaacatccttttgtaatgcattgatccagagcctggagtcaaatcctttaaccaaaatcgcttggagggcggcaaagcctttgctgatgggaaaaatcctgtacactcctgattcacctgcagcacgaaggatactgaagaatgccaactcaacttttgaagaactggaacacgttaggaagttggtcaaagcctgggaagaagtagggccccagatctggtacttctttgacaacagcacacagatgaacatgatcagagataccctggggaacccaacagtaaaagactttttgaataggcagcttggtgaagaaggtattactgctgaagccatcctaaacttcctctacaagggccctcgggaaagccaggctgacgacatggccaacttcgactggagggacatatttaacatcactgatcgcaccctccgcctggtcaatcaatacctggagtgcttggtcctggataagtttgaaagctacaatgatgaaactcagctcacccaacgtgccctctctctactggaggaaaacatgttctgggccggagtggtattccctgacatgtatccctggaccagctctctaccaccccacgtgaagtataagatccgaatggacatagacgtggtggagaaaaccaataagattaaagacaggtattgggattctggtcccagagctgatcccgtggaagatttccggtacatctggggcgggtttgcctatctgcaggacatggttgaacaggggatcacaaggagccaggtgcaggcggaggctccagttggaatctacctccagcagatgccctacccctgcttcgtggacgattctttcatgatcatcctgaaccgctgtttccctatcttcatggtgctggcatggatctactctgtctccatgactgtgaagagcatcgtcttggagaaggagttgcgactgaaggagaccttgaaaaatcagggtgtctccaatgcagtgatttggtgtacctggttcctggacagcttctccatcatgtcgatgagcatcttcctcctgacgatattcatcatgcatggaagaatcctacattacagcgacccattcatcctcttcctgttcttgttggctttctccactgccaccatcatgctgtgctttctgctcagcaccttcttctccaaggccagtctggcagcagcctgtagtggtgtcatctatttcaccctctacctgccacacatcctgtgcttcgcctggcaggaccgcatgaccgctgagctgaagaaggctgtgagcttactgtctccggtggcatttggatttggcactgagtacctggttcgctttgaagagcaaggcctggggctgcagtggagcaacatcgggaacagtcccacggaaggggacgaattcagcttcctgctgtccatgcagatgatgctccttgatgctgctgtctatggcttactcgcttggtaccttgatcaggtgtttccaggagactatggaaccccacttccttggtactttcttctacaagagtcgtattggcttggcggtgaagggtgttcaaccagagaagaaagagccctggaaaagaccgagcccctaacagaggaaacggaggatccagagcacccagaaggaatacacgactccttctttgaacgtgagcatccagggtgggttcctggggtatgcgtgaagaatctggtaaagatttttgagccctgtggccggccagctgtggaccgtctgaacatcaccttctacgagaaccagatcaccgcattcctgggccacaatggagctgggaaaaccaccaccttgtccatcctgacgggtctgttgccaccaacctctgggactgtgctcgttgggggaagggacattgaaaccagcctggatgcagtccggcagagccttggcatgtgtccacagcacaacatcctgttccaccacctcacggtggctgagcacatgctgttctatgcccagctgaaaggaaagtcccaggaggaggcccagctggagatggaagccatgttggaggacacaggcctccaccacaagcggaatgaagaggctcaggacctatcaggtggcatgcagagaaagctgtcggttgccattgcctttgtgggagatgccaaggtggtgattctggacgaacccacctctggggtggacccttactcgagacgctcaatctgggatctgctcctgaagtatcgctcaggcagaaccatcatcatgtccactcaccacatggacgaggccgacctccttggggaccgcattgccatcattgcccagggaaggctctactgctcaggcaccccactcttcctgaagaactgctttggcacaggcttgtacttaaccttggtgcgcaagatgaaaaacatccagagccaaaggaaaggcagtgaggggacctgcagctgctcgtctaagggtttctccaccacgtgtccagcccacgtcgatgacctaactccagaacaagtcctggatggggatgtaaatgagctgatggatgtagttctccaccatgttccagaggcaaagctggtggagtgcattggtcaagaacttatcttccttcttccaaataagaacttcaagcacagagcatatgccagccttttcagagagctggaggagacgctggctgaccttggtctcagcagttttggaatttctgacactcccctggaagagatttttctgaaggtcacggaggattctgattcaggacctctgtttgcgggtggcgctcagcagaaaagagaaaacgtcaacccccgacacccctgcttgggtcccagagagaaggctggacagacaccccaggactccaatgtctgctccccaggggcgccggctgctcacccagagggccagcctcccccagagccagagtgcccaggcccgcagctcaacacggggacacagctggtcctccagcatgtgcaggcgctgctggtcaagagattccaacacaccatccgcagccacaaggacttcctggcgcagatcgtgctcccggctacctttgtgtttttggctctgatgctttctattgttatccctccttttggcgaataccccgctttgacccttcacccctggatatatgggcagcagtacaccttcttcagcatggatgaaccaggcagtgagcagttcacggtacttgcagacgtcctcctgaataagccaggctttggcaaccgctgcctgaaggaagggtggcttccggagtacccctgtggcaactcaacaccctggaagactccttctgtgtccccaaacatcacccagctgttccagaagcagaaatggacacaggtcaacccttcaccatcctgcaggtgcagcaccagggagaagctcaccatgctgccagagtgccccgagggtgccgggggcctcccgcccccccagagaacacagcgcagcacggaaattctacaagacctgacggacaggaacatctccgacttcttggtaaaaacgtatcctgctcttataagaagcagcttaaagagcaaattctgggtcaatgaacagaggtatggaggaatttccattggaggaaagctcccagtcgtccccatcacgggggaagcacttgttgggtttttaagcgaccttggccggatcatgaatgtgagcgggggccctatcactagagaggcctctaaagaaatacctgatttccttaaacatctagaaactgaagacaacattaaggtgtggtttaataacaaaggctggcatgccctggtcagctttctcaatgtggcccacaacgccatcttacgggccagcctgcctaaggacaggagccccgaggagtatggaatcaccgtcattagccaacccctgaacctgaccaaggagcagctctcagagattacagtgctgaccacttcagtggatgctgtggttgccatctgcgtgattttctccatgtccttcgtcccagccagctttgtcctttatttgatccaggagcgggtgaacaaatccaagcacctccagtttatcagtggagtgagccccaccacctactgggtgaccaacttcctctgggacatcatgaattattccgtgagtgctgggctggtggtgggcatcttcatcgggtttcagaagaaagcctacacttctccagaaaaccttcctgcccttgtggcactgctcctgctgtatggatgggcggtcattcccatgatgtacccagcatccttcctgtttgatgtccccagcacagcctatgtggctttatcttgtgctaatctgttcatcggcatcaacagcagtgctattaccttcatcttggaattatttgagaataaccggacgctgctcaggttcaacgccgtgctgaggaagctgctcattgtcttcccccacttctgcctgggccggggcctcattgaccttgcactgagccaggctgtgacagatgtctatgcccggtttggtgaggagcactctgcaaatccgttccactgggacctgattgggaagaacctgtttgccatggtggtggaaggggtggtgtacttcctcctgaccctgctggtccagcgccacttcttcctctcccaatggattgccgagcccactaaggagcccattgttgatgaagatgatgatgtggctgaagaaagacaaagaattattactggtggaaataaaactgacatcttaaggctacatgaactaaccaagatttatccaggcacctccagcccagcagtggacaggctgtgtgtcggagttcgccctggagagtgctttggcctcctgggagtgaatggtgccggcaaaacaaccacattcaagatgctcactggggacaccacagtgacctcaggggatgccaccgtagcaggcaagagtattttaaccaatatttctgaagtccatcaaaatatgggctactgtcctcagtttgatgcaattgatgagctgctcacaggacgagaacatctttacctttatgcccggcttcgaggtgtaccagcagaagaaatcgaaaaggttgcaaactggagtattaagagcctgggcctgactgtctacgccgactgcctggctggcacgtacagtgggggcaacaagcggaaactctccacagccatcgcactcattggctgcccaccgctggtgctgctggatgagcccaccacagggatggacccccaggcacgccgcatgctgtggaacgtcatcgtgagcatcatcagagaagggagggctgtggtcctcacatcccacagcatggaagaatgtgaggcactgtgtacccggctggccatcatggtaaagggcgcctttcgatgtatgggcaccattcagcatctcaagtccaaatttggagatggctatatcgtcacaatgaagatcaaatccccgaaggacgacctgcttcctgacctgaaccctgtggagcagttcttccaggggaacttcccaggcagtgtgcagagggagaggcactacaacatgctccagttccaggtctcctcctcctccctggcgaggatcttccagctcctcctctcccacaaggacagcctgctcatcgaggagtactcagtcacacagaccacactggaccaggtgtttgtaaattttgctaaacagcagactgaaagtcatgacctccctctgcaccctcgagctgctggagccagtcgacaagcccaggactga

SEQ ID NO: 391 - DNA, 5421 bp, Homo sapiens
  source 1..5421: mol_type = genomic DNA
atggagccgtggtcctctaggtggaaaacgaaacggtggctctgggatttcaccgtaacaaccctcgcattgaccttcctcttccaagctagagaggtcagaggagctgctccagttgatgtactaaaagcactagattttcacaattctccagagggaatatcaaaaacaacgggattttgcacaaacagaaagaattctaaaggctcagatactgcttacagagtttcaaagcaagcacaactcagtgccccaacaaaacagttatttccaggtggaactttcccagaagacttttcaatactatttacagtaaaaccaaaaaaaggaattcagtctttccttttatctatatataatgagcatggtattcagcaaattggtgttgaggttgggagatcacctgtttttctgtttgaagaccacactggaaaacctgccccagaagactatcccctcttcagaactgttaacatcgctgacgggaagtggcatcgggtagcaatcagcgtggagaagaaaactgtgacaatgattgttgattgtaagaagaaaaccacgaaaccacttgatagaagtgagagagcaattgttgataccaatggaatcacggtttttggaacaaggattttggatgaagaagtttttgagggggacattcagcagtttttgatcacaggtgatcccaaggcagcatatgactactgtgagcattatagtccagactgtgactcttcagcacccaaggctgctcaagctcaggaacctcagatagatgagtatgcaccagaggatataatcgaatatgactatgagtatggggaagcagagtataaagaggctgaaagtgtaacagagggacccactgtaactgaggagacaatagcacagacggaggcaaacatcgttgatgattttcaagaatacaactatggaacaatggaaagttaccagacagaagctcctaggcatgtttctgggacaaatgagccaaatccagttgaagaaatatttactgaagaatatctaacgggagaggattatgattcccagaggaaaaattctgaggatacactatatgaaaacaaagaaatagacggcagggattctgatcttctggtagatggagatttaggcgaatatgatttttatgaatataaagaatatgaagataaaccaacaagcccccctaatgaagaatttggtccaggtgtaccagcagaaactgatattacagaaacaagcataaatggccatggtgcatatggagagaaaggacagaaaggagaaccagcagtggttgagcctggtatgcttgtcgaaggaccaccaggaccagcaggacctgcaggtattatgggtcctccaggtctacaaggccccactggaccccctggtgaccctggcgataggggccccccaggacgtcctggcttaccaggggctgatggtctacctggtcctcctggtactatgttgatgttaccgttccgttatggtggtgatggttccaaaggaccaaccatctctgctcaggaagctcaggctcaagctattcttcagcaggctcggattgctctgagaggcccacctggcccaatgggtctaactggaagaccaggtcctgtgggggggcctggttcatctggggccaaaggtgagagtggtgatccaggtcctcagggccctcgaggcgtccagggtccccctggtccaacgggaaaacctggaaaaaggggtcgtccaggtgcagatggaggaagaggaatgccaggagaacctggggcaaagggagatcgagggtttgatggacttccgggtctgccaggtgacaaaggtcacaggggtgaacgaggtcctcaaggtcctccaggtcctcctggtgatgatggaatgaggggagaagatggagaaattggaccaagaggtcttccaggtgaagctggcccacgaggtttgctgggtccaaggggaactccaggagctccagggcagcctggtatggcaggtgtagatggccccccaggaccaaaagggaacatgggtccccaaggggagcctgggcctccaggtcaacaagggaatccaggacctcagggtcttcctggtccacaaggtccaattggtcctcctggtgaaaaaggaccacaaggaaaaccaggacttgctggacttcctggtgctgatgggcctcctggtcatcctgggaaagaaggccagtctggagaaaagggggctctgggtccccctggtccacaaggtcctattggatacccgggcccccggggagtaaagggagcagatggtgtcagaggtctcaagggatctaaaggtgaaaagggtgaagatggttttccaggattcaaaggtgacatgggtctaaaaggtgacagaggagaagttggtcaaattggcccaagaggggaagatggccctgaaggacccaaaggtcgagcaggcccaactggagacccaggtccttcaggtcaagcaggagaaaagggaaaacttggagttccaggattaccaggatatccaggaagacaaggtccaaagggttccactggattccctgggtttccaggtgccaatggagagaaaggtgcacggggagtagctggcaaaccaggccctcggggtcagcgtggtccaacgggtcctcgaggttcaagaggtgcaagaggtcccactgggaaacctgggccaaagggcacttcaggtggcgatggccctcctggccctccaggtgaaagaggtcctcaaggacctcagggtccagttggattccctggaccaaaaggccctcctggaccacctgggaaggatgggctgccaggacaccctgggcaacgtggggagactggatttcaaggcaagaccggccctcctgggccagggggagtggttggaccacagggaccaaccggtgagactggtccaataggggaacgtgggcatcctggccctcctggccctcctggtgagcaaggtcttcctggtgctgcaggaaaagaaggtgcaaagggtgatccaggtcctcaaggtatctcagggaaagatggaccagcaggattacgtggtttcccaggggaaagaggtcttcctggagctcagggtgcacctggactgaaaggaggggaaggtccccagggcccaccaggtccagttggctcaccaggagaacgtgggtcagcaggtacagctggcccaattggtttaccagggcgcccgggacctcagggtcctcctggtccagctggagagaaaggtgctcctggagaaaaaggtccccaagggcctgcagggagagatggagttcaaggtcctgttggtctcccagggccagctggtcctgccggctcccctggggaagacggagacaagggtgaaattggtgagccgggacaaaaaggcagcaagggtgacaagggagaaaatggccctcccggtcccccaggtcttcaaggaccagttggtgcccctggaattgctggaggtgatggtgaaccaggtcctagaggacagcaggggatgtttgggcaaaaaggtgatgagggtgccagaggcttccctggacctcctggtccaataggtcttcagggtctgccaggcccacctggtgaaaaaggtgaaaatggggatgttggtcccatggggccacctggtcctccaggcccaagaggccctcaaggtcccaatggagctgatggaccacaaggacccccagggtctgttggttcagttggtggtgttggagaaaagggtgaacctggagaagcagggaacccagggcctcctggggaagcaggtgtaggcggtcccaaaggagaaagaggagagaaaggggaagctggtccacctggagctgctggacctccaggtgccaaggggccaccaggtgatgatggccctaagggtaacccgggtcctgttggttttcctggagatcctggtcctcctggggaacctggccctgcaggtcaagatggtgttggtggtgacaagggtgaagatggagatcctggtcaaccgggtcctcctggcccatctggtgaggctggcccaccaggtcctcctggaaaacgaggtcctcctggagctgcaggtgcagagggaagacaaggtgaaaaaggtgctaagggggaagcaggtgcagaaggtcctcctggaaaaaccggcccagtcggtcctcagggacctgcaggaaagcctggtccagaaggtcttcggggcatccctggtcctgtgggagaacaaggtctccctggagctgcaggccaagatggaccacctggtcctatgggacctcctggcttacctggtctcaaaggtgaccctggctccaagggtgaaaagggacatcctggtttaattggcctgattggtcctccaggagaacaaggggaaaaaggtgaccgagggctccctggaactcaaggatctccaggagcaaaaggggatgggggaattcctggtcctgctggtcccttaggtccacctggtcctccaggtttaccaggtcctcaaggcccaaagggtaacaaaggctctactggacccgctggccagaaaggtgacagtggtcttccagggcctcctgggtctccaggtccacctggtgaagtcattcagcctttaccaatcttgtcctccaaaaaaacgagaagacatactgaaggcatgcaagcagatgcagatgataatattcttgattactcggatggaatggaagaaatatttggttccctcaattccctgaaacaagacattgagcatatgaaatttccaatgggtactcagaccaatccagcccgaacttgtaaagacctgcaactcagccatcctgacttcccagatggtgaatattggattgatcctaaccaaggttgctcaggagattccttcaaagtttactgtaatttcacatctggtggtgagacttgcatttatccagacaaaaaatctgagggagtaagaatttcatcatggccaaaggagaaaccaggaagttggtttagtgaatttaagaggggaaaactgctttcatacttagatgttgaaggaaattccatcaatatggtgcaaatgacattcctgaaacttctgactgcctctgctcggcaaaatttcacctaccactgtcatcagtcagcagcctggtatgatgtgtcatcaggaagttatgacaaagcacttcgcttcctgggatcaaatgatgaggagatgtcctatgacaataatccttttatcaaaacactgtatgatggttgtgcgtccagaaaaggctatgaaaagactgtcattgaaatcaatacaccaaaaattgatcaagtacctattgttgatgtcatgatcaatgactttggtgatcagaatcagaagttcggatttgaagttggtcctgtttgttttcttggctaa

SEQ ID NO: 392 - DNA, 1065 bp, Homo sapiens
  source 1..1065: mol_type = genomic DNA
atgggaagtggagccagtgctgaggacaaagaactggccaagaggtccaaggagctagaaaagaagctgcaggaggatgctgataaggaagccaagactgtcaagctgctactgctgggtgctggggagtcaggaaagagcaccatcgtcaaacagatgaagatcattcaccaggatggctattcaccagaagaatgcctggagttcaaggctatcatctatggaaatgtgctgcagtccatcctggctatcatccgggccatgaccacactgggcatcgattatgctgaaccaagctgtgcggatgacgggcgacagctcaacaacctggctgactccattgaggagggaaccatgcctcctgagctcgtggaggtcattaggaggttgtggaaggatggtggggtgcaagcctgcttcgagagagctgcagaataccagcttaatgactccgcatcttactacctgaaccaattagaacgaattacagaccctgagtacctccctagtgagcaagatgtgctccgatccagagtcaaaaccacgggcatcattgaaaccaagttttccgtcaaagacttgaatttcaggatgtttgatgtgggagggcagagatccgagagaaagaagtggatccactgcttcgagggagtcacctgcatcattttctgtgcagccctcagtgcctatgatatggtgctggtggaagatgacgaagtgaatcgtatgcatgagtctttgcatctgttcaacagcatatgtaaccacaaattctttgcggctacttccattgtcctctttctcaacaagaaggacctctttgaggaaaaaatcaagaaagtccatctcagcatttgttttccagagtatgatggtaacaactcctatgatgatgcggggaattacataaagagccagttccttgacctcaatatgcgaaaagatgtcaaagaaatctacagtcacatgacctgtgctacagatacacagaatgtcaaatttgtgtttgatgcagttacagatattatcatcaaagaaaacctcaaggactgcggcctcttctaa

SEQ ID NO: 393 - DNA, 1656 bp, Homo sapiens
  source 1..1656: mol_type = genomic DNA
atgctgtgttctttgctcctttgtgaatgtctgttgctggtagctggttatgctcatgatgatgactggattgaccccacagacatgcttaactatgatgctgcttcaggaacaatgagaaaatctcaggcaaaatatggtatttcaggggaaaaggatgtcagtcctgacttgtcatgtgctgatgaaatatcagaatgttatcacaaacttgattctttaacttataagattgatgagtgtgaaaagaaaaagagggaagactatgaaagtcaaagcaatcctgtttttaggagatacttaaataagattttaattgaagctggaaagcttggacttcctgatgaaaacaaaggcgatatgcattatgatgctgagattatccttaaaagagaaactttgttagaaatacagaagtttctcaatggagaagactggaaaccaggtgccttggatgatgcactaagtgatattttaattaattttaagtttcatgattttgaaacatggaagtggcgattcgaagattcctttggagtggatccatataatgtgttaatggtacttctttgtctgctctgcatcgtggttttagtggctactgagctgtggacatatgtacgttggtacactcagttgagacgtgttttaatcatcagctttctgttcagtttgggatggaattggatgtatttatataagctagcttttgcacagcatcaggctgaagtcgccaagatggagccattaaacaatgtgtgtgccaaaaagatggactggactggaagtatctgggaatggtttagaagttcatggacctataaggatgacccatgccaaaaatactatgagctcttactagtcaaccctatttggttggtcccaccaacaaaggcacttgcagttacattcaccacatttgtaacggagccattgaagcatattggaaaaggaactggggaatttattaaagcactcatgaaggaaattccagcgctgcttcatcttccagtgctgataattatggcattagccatcctgagtttctgctatggtgctggaaaatcagttcatgtgctgagacatataggcggtcctgagagcgaacctccccaggcacttcggccacgggatagaagacggcaggaggaaattgattatagacctgatggtggagcaggtgatgccgatttccattataggggccaaatgggccccactgagcaaggcccttatgccaaaacgtatgagggtagaagagagattttgagagagagagatgttgacttgagatttcagactggcaacaagagccctgaagtgctccgggcatttgatgtaccagacgcagaggcacgagagcatcccacggtggtacccagtcataaatcacctgttttggatacaaagcccaaggagacaggtggaatcctgggggaaggcacaccgaaagaaagcagtactgaaagcagccagtcggccaagcctgtctctggccaagacacatcagggaatacagaaggttcacccgcagcggaaaaggcccagctcaagtctgaagccgcaggcagcccagaccaaggcagcacatacagccccgcaagaggtgtggctggaccacgtggacaggatccggtcagcagcccctgtggctag

SEQ ID NO: 394 - DNA, 801 bp, Homo sapiens
  source 1..801: mol_type = genomic DNA
atgtggtggtttcagcaaggcctcagtttccttccttcagcccttgtaatttggacatctgctgctttcatattttcatacattactgcagtaacactccaccatatagacccggctttaccttatatcagtgacactggtacagtagctccagaaaaatgcttatttggggcaatgctaaatattgcggcagttttatgcattgctaccatttatgttcgttataagcaagttcatgctctgagtcctgaagagaacgttatcatcaaattaaacaaggctggccttgtacttggaatactgagttgtttaggactttctattgtggcaaacttccagaaaacaaccctttttgctgcacatgtaagtggagctgtgcttacctttggtatgggctcattatatatgtttgttcagaccatcctttcctaccaaatgcagcccaaaatccatggcaaacaagtcttctggatcagactgttgttggttatctggtgtggagtaagtgcacttagcatgctgacttgctcatcagttttgcacagtggcaattttgggactgatttagaacagaaactccattggaaccccgaggacaaaggttatgtgcttcacatgatcactactgcagcagaatggtctatgtcattttccttctttggttttttcctgacttacattcgtgattttcagaaaatttctttacgggtggaagccaatttacatggattaaccctctatgacactgcaccttgccctattaacaatgaacgaacacggctactttccagagatatttga

SEQ ID NO: 395 - DNA, 2052 bp, Homo sapiens
  source 1..2052: mol_type = genomic DNA
atggcactgtcaaagagggagctggatgagctgaaaccatggatagagaagacagtgaagagggtcctgggtttctcagagcctacggtggtcacagcagcattgaactgtgtggggaagggcatggacaagaagaaggcagccgatcatctgaaaccttttcttgatgattctactctccgatttgtggacaaactgtttgaggctgtggaggaaggccgaagctctaggcattccaagtctagcagtgacaggagcagaaaacgagagctaaaggaggtgtttggtgatgactctgagatctctaaagaatcatcaggagtaaagaagcgacgaataccccgttttgaggaggtggaagaagagccagaggtgatccctgggcctccatcagagagccctggcatgctgactaagctccagatcaaacagatgatggaggcagcaacacgacaaatcgaggagaggaaaaaacagctgagcttcattagcccccctacacctcagccaaagactccttcttcctcccaaccagaacgacttcctattggcaacactattcagccctcccaggctgccactttcatgaatgatgccattgagaaggcaaggaaagcagctgaactgcaagctcgaatccaagcccagctggcactgaagccaggactcatcggcaatgccaacatggtgggcctggctaatctccatgccatgggcattgctcccccgaaggtggagttaaaagaccaaacgaaacctacaccactgatcctggatgagcaagggcgcactgtagatgcaacaggcaaggagattgagctgacacaccgcatgcctactctgaaagccaatattcgtgctgtgaagagggaacaattcaagcaacaactaaaggaaaagccatcagaagacatggaatccaataccttttttgacccccgagtctccattgccccttcccagcgccagagacgcacttttaaattccatgacaagggcaaatttgagaagattgctcagcgattacggacaaaggctcaactggagaagctacaggcagagatttcacaagcagctcgaaaaacaggcatccatacttcgactaggcttgccctcattgctcctaagaaggagctaaaggaaggagatattcctgaaattgagtggtgggactcttacataatccccaatggctttgatcttacagaggaaaatcccaagagagaagattattttggaatcacaaatcttgttgaacatccagcccagctcaatcctccagttgacaatgacacaccagttactctgggagtatatcttaccaagaaggaacagaaaaaacttcggagacaaacaaggagggaagcacagaaggaactacaagaaaaagtcaggctgggcctgatgcctcctccagaacccaaagtgagaatttctaatttgatgcgagtattaggaacagaagctgttcaagaccccacgaaggtagaagcccacgtcagagctcagatggcaaaaagacagaaagcgcatgaagaggccaacgctgcccgaaaactcacagcagaacagagaaaggtcaagaaaattaaaaagcttaaagaagacatttcacagggggtacacatatctgtatatagagttcgaaatttgagcaacccagccaagaagttcaagattgaagccaatgctgggcaactgtacctgacaggggtggtggtactgcacaaggatgtcaacgtggtagtagtggaagggggccccaaggcccagaagaaatttaagcgtcttatgctgcatcggataaagtgggatgaacagacatctaacacaaagggagatgatgatgaggagtctgatgaggaagctgtgaagaaaaccaacaaatgtgtactagtctgggagggtacagccaaagaccggagctttggagagatgaagtttaaacagtgtcctacagagaacatggctcgtgagcatttcaaaaagcatggggctgaacactactgggaccttgcgctgagtgaatctgtgttagagtccactgattga

SEQ ID NO: 396 - DNA, 366 bp, Homo sapiens
  source 1..366: mol_type = genomic DNA
atgtcccagaaacaagaagaagagaaccctgcggaggagaccggcgaggagaagcaggacacgcaggagaaagaaggtattctgcctgagagagctgaagaggcaaagctaaaggccaaatacccaagcctaggacaaaagcctggaggctccgacttcctcatgaagagactccagaaagggcaaaagtactttgactcaggagactacaacatggccaaagccaagatgaagaataagcagctgccaagtgcaggaccagacaagaacctggtgactggtgatcacatccccaccccacaggatctgccccagagaaagtcctcgctcgtcaccagcaagcttgcgggtggccaagttgaatga

SEQ ID NO: 397 - DNA, 2286 bp, Homo sapiens
  source 1..2286: mol_type = genomic DNA
atggccctcccagccctgggcctggacccctggagcctcctgggccttttcctcttccaactgcttcagctgctgctgccgacgacgaccgcggggggaggcgggcaggggcccatgcccagggtcagatactatgcaggggatgaacgtagggcacttagcttcttccaccagaagggcctccaggattttgacactctgctcctgagtggtgatggaaatactctctacgtgggggctcgagaagccattctggccttggatatccaggatccaggggtccccaggctaaagaacatgataccgtggccagccagtgacagaaaaaagagtgaatgtgcctttaagaagaagagcaatgagacacagtgtttcaacttcatccgtgtcctggtttcttacaatgtcacccatctctacacctgcggcaccttcgccttcagccctgcttgtaccttcattgaacttcaagattcctacctgttgcccatctcggaggacaaggtcatggagggaaaaggccaaagcccctttgaccccgctcacaagcatacggctgtcttggtggatgggatgctctattctggtactatgaacaacttcctgggcagtgagcccatcctgatgcgcacactgggatcccagcctgtcctcaagaccgacaacttcctccgctggctgcatcatgacgcctcctttgtggcagccatcccttcgacccaggtcgtctacttcttcttcgaggagacagccagcgagtttgacttctttgagaggctccacacatcgcgggtggctagagtctgcaagaatgacgtgggcggcgaaaagctgctgcagaagaagtggaccaccttcctgaaggcccagctgctctgcacccagccggggcagctgcccttcaacgtcatccgccacgcggtcctgctccccgccgattctcccacagctccccacatctacgcagtcttcacctcccagtggcaggttggcgggaccaggagctctgcggtttgtgccttctctctcttggacattgaacgtgtctttaaggggaaatacaaagagttgaacaaagaaacttcacgctggactacttataggggccctgagaccaacccccggccaggcagttgctcagtgggcccctcctctgataaggccctgaccttcatgaaggaccatttcctgatggatgagcaagtggtggggacgcccctgctggtgaaatctggcgtggagtatacacggcttgcagtggagacagcccagggccttgatgggcacagccatcttgtcatgtacctgggaaccaccacagggtcgctccacaaggctgtggtaagtggggacagcagtgctcatctggtggaagagattcagctgttccctgaccctgaacctgttcgcaacctgcagctggcccccacccagggtgcagtgtttgtaggcttctcaggaggtgtctggagggtgccccgagccaactgtagtgtctatgagagctgtgtggactgtgtccttgcccgggacccccactgtgcctgggaccctgagtcccgaacctgttgcctcctgtctgcccccaacctgaactcctggaagcaggacatggagcgggggaacccagagtgggcatgtgccagtggccccatgagcaggagccttcggcctcagagccgcccgcaaatcattaaagaagtcctggctgtccccaactccatcctggagctcccctgcccccacctgtcagccttggcctcttattattggagtcatggcccagcagcagtcccagaagcctcttccactgtctacaatggctccctcttgctgatagtgcaggatggagttgggggtctctaccagtgctgggcaactgagaatggcttttcataccctgtgatctcctactgggtggacagccaggaccagaccctggccctggatcctgaactggcaggcatcccccgggagcatgtgaaggtcccgttgaccagggtcagtggtggggccgccctggctgcccagcagtcctactggccccactttgtcactgtcactgtcctctttgccttagtgctttcaggagccctcatcatcctcgtggcctccccattgagagcactccgggctcggggcaaggttcagggctgtgagaccctgcgccctggggagaaggccccgttaagcagagagcaacacctccagtctcccaaggaatgcaggacctctgccagtgatgtggacgctgacaacaactgcctaggcactgaggtagcttaa

SEQ ID NO: 398 - DNA, 2013 bp, Homo sapiens
  source 1..2013: mol_type = genomic DNA
atgggggagccggctggggttgccggcaccatggagtcaccttttagcccgggactctttcacaggctggatgaagattgggattctgctctctttgctgaactcggttatttcacagacactgatgagctgcaattggaagcagcaaatgagacgtatgaaaacaattttgataatcttgattttgatttggatttgatgccttgggagtcagacatttgggacatcaacaaccaaatctgtacagttaaagatattaaggcagaacctcagccactttctccagcctcctcaagttattcagtctcgtctcctcggtcagtggactcttattcttcaactcagcatgttcctgaggagttggatttgtcttctagttctcagatgtctcccctttccttatatggtgaaaactctaatagtctctcttcagcggagccactgaaggaagataagcctgtcactggtcctaggaacaagactgaaaatggactgactccaaagaaaaaaattcaggtgaattcaaaaccttcaattcagcccaagcctttattgcttccagcagcacccaagactcaaacaaactccagtgttccagcaaaaaccatcattattcagacagtaccaacgcttatgccattggcaaagcagcaaccaattatcagtttacaacctgcacccactaaaggccagacggttttgctgtctcagcctactgtggtacaacttcaagcacctggagttctgccctctgctcagccagtccttgctgttgctgggggagtcacacagctccctaatcacgtggtgaatgtggtaccagccccttcagcgaatagcccagtgaatggaaaactttccgtgactaaacctgtcctacaaagtaccatgagaaatgtcggttcagatattgctgtgctaaggagacagcaacgtatgataaaaaatcgagaatccgcttgtcagtctcgcaagaagaagaaagaatatatgctagggttagaggcgagattaaaggctgccctctcagaaaacgagcaactgaagaaagaaaatggaacactgaagcggcagctggatgaagttgtgtcagagaaccagaggcttaaagtccctagtccaaagcgaagagttgtctgtgtgatgatagtattggcatttataatactgaactatggacctatgagcatgttggaacaggattccaggagaatgaaccctagtgtgagccctgcaaatcaaaggaggcaccttctaggattttctgctaaagaggcacaggacacatcagatggtattatccagaaaaacagctacagatatgatcattctgtttcaaatgacaaagccctgatggtgctaactgaagaaccattgctttacattcctccacctccttgtcagcccctaattaacacaacagagtctctcaggttaaatcatgaacttcgaggatgggttcatagacatgaagtagaaaggaccaagtcaagaagaatgacaaataatcaacagaaaacccgtattcttcagggtgctctggaacagggctcaaattctcagctgatggctgttcaatacacagaaaccactagtagtatcagcaggaactcagggagtgagctacaagtgtattatgcttcacccagaagttatcaagacttttttgaagccatccgcagaaggggagacacattttatgttgtgtcatttcgaagggatcacctgctgttaccagctaccacccataacaagaccacaagaccaaaaatgtcaattgtgttaccagcaataaacataaatgagaatgtgatcaatgggcaggactacgaagtgatgatgcagattgactgtcaggtgatggacaccaggatcctccatatcaaaagttcgtcagttcctccttacctccgagatcagcagaggaatcaaaccaacaccttctttggctcccctcccgcagccacagaggcaacccacgttgtcagcaccatccctgagtcattacaatag

SEQ ID NO: 399 - DNA, 16908 bp, Homo sapiens
  source 1..16908: mol_type = genomic DNA
atgatttcctgggaagttgtccatacagtattcctgtttgctcttctttattcttccctagctcaagatgcgagcccccagtcagagatcagagctgaggaaattcccgagggggcctccacgttggcttttgtgtttgatgtgactggttctatgtatgatgatttagttcaggtgattgaaggggcttccaaaattttggagacgtctttgaaaagacctaaaagacctcttttcaactttgcgttggtgcctttccatgatccagaaattggcccagtgacaattaccacagatcccaagaaatttcaatatgaactcagagaactgtatgttcagggtggtggtgattgcccagaaatgagtattggagctataaaaattgccttggaaatttctcttcctggttctttcatctatgttttcactgatgctcggtccaaagattaccggctcacccatgaggtgctgcaacttatccaacagaaacagtcacaagtcgtatttgttctgactggagattgtgatgacaggacccatattggatataaagtctatgaagaaattgcctctacaagttctggtcaagtgttccatctggacaaaaaacaagttaatgaggtattaaaatgggtagaagaagcagtacaggcctccaaagttcaccttttatccacagatcatttggaacaggctgtaaatacttggagaattccttttgatcccagcctgaaagaggtcactgtgtctttgagtgggccttctccaatgattgaaattcgcaatcctttagggaagctgataaaaaagggatttggcctgcatgagctattaaatatccataactctgccaaagtagtgaatgtgaaagagccagaggctggaatgtggacagtgaagacctcaagcagtggaaggcactctgttcgcattactggcctcagtactattgatttccgagctggcttttctcgaaagcccaccctggacttcaaaaaaacagtcagcagaccagtgcaaggaatacctacctatgtactgctcaatacttctggaatttccactccagctagaatagatcttcttgaacttttgagtatctcaggaagttctcttaagactattcctgttaaatattacccacatcgaaaaccttatggcatatggaatatttctgactttgtaccaccaaatgaagctttctttctcaaagtaacaggctatgataaagatgattacctcttccagagagtatcaagtgtttccttttctagtattgtcccagatgctcccaaagttacgatgcctgagaaaaccccaggatactatctgcagccgggccaaattccctgctctgttgacagtcttttgccctttaccttgagctttgtcagaaatggagttacacttggagtagaccagtatttgaaagaatctgccagtgtgaacttagatattgcaaaggtcactttgtctgacgaaggtttctatgaatgcattgctgtcagcagtgcaggtactggacgggcacagacattttttgacgtatcagagccccctccggtcatccaagtgcctaacaatgttacagtcactcctggagagagagcagttttaacatgtctcatcatcagtgcggtggattacaatctaacctggcagaggaatgacagagatgtcagactggcagagccagcgagaattaggaccttggctaatctgtcattggagctaaagagtgtgaaattcaacgatgctggagagtatcattgtatggtttctagtgaaggtggatcatcagccgcttcagttttcctcacagtgcaagaaccacccaaagtcactgtgatgcccaagaatcagtctttcacaggagggtctgaggtctccatcatgtgttctgcaacaggttatcccaaaccaaagattgcctggaccgttaacgatatgtttatcgtgggttcacacaggtataggatgacctcagatggtaccttatttatcaaaaatgcagctcccaaagatgcagggatctatggttgcctagcaagtaattcagctggaacagataaacagaattctactctcagatacattgaagcccctaagttgatggtagttcagagtgagctcttggttgcccttggggatataaccgttatggaatgcaaaacctctggtattcctccacctcaagttaaatggttcaaaggagatcttgagttgaggccctcaacattcctcattattgaccctctcttgggacttttgaagattcaagaaacacaagatctggatgctggcgattatacctgtgtagccatcaatgaggctggaagagcaactggcaagataactctggatgttggctcacctccagttttcatacaagaacctgctgatgtgtctatggaaattggctcaaatgtgacattaccttgttatgttcagggttatccagaaccaacaatcaaatggcgaagattagacaacatgccaattttctcaagacctttttcagttagttccatcagccaactaagaacaggagctctctttattttaaacttatgggcaagtgataaaggaacctatatttgtgaagctgaaaaccagtttggaaagatccagtcagagacaacagtaacagtgaccggacttgttgctccacttattggaatcagcccttcagtggccaatgttattgaaggacagcagcttactttgccctgtactctgttagctggaaatcccattccagaacgtcggtggattaagaattcagctatgttgctccaaaatccttacatcactgtgcgcagtgatgggagcctccatattgaaagagttcagcttcaggatggtggtgaatatacttgtgtggccagtaacgttgctgggaccaataacaaaactacctctgtggttgtgcatgttctgccaaccattcagcatgggcagcagatactcagtacaattgaaggcattccagtaactttaccatgcaaagcaagtggaaatcccaaaccgtctgtcatctggtccaagaaaggagagctgatttcaaccagcagtgctaagttttcagcaggagctgatggtagtctgtatgtggtatcacctggaggagaggagagtggggagtatgtctgcactgccaccaatacagccggctacgccaaaaggaaagtgcagctaacagtctatgtaaggcccagagtgtttggagatcaacgaggactgtcccaggataagcctgttgagatctccgtccttgcaggggaagaggtaacacttccatgtgaagtgaagagcttacctccacccataattacttgggccaaagaaacccagctcatctcaccgttctctccaagacacacattcctcccttctggttcaatgaagatcactgaaacccgcacttcagatagtgggatgtatctttgtgttgccacaaatattgctgggaatgtgactcaggctgtcaaattaaatgtccatgttcctccaaagatacagcgtggacctaaacatctcaaagtccaagttggtcaaagagtggatattccatgtaatgctcaagggactcctcttcctgtaatcacctggtccaaaggtggaagcactatgctggttgatggagagcaccatgttagcaatccagacggaactttaagcatcgaccaagccacgccctcagatgctggcatatatacatgtgttgctactaacatagcaggcactgatgaaacagagataacgctacatgtccaagaaccacccacagtggaagatctagaacctccatataacactactttccaagaaagagtggccaatcaacgcattgaatttccatgtcctgcaaaaggtacccctaaaccaaccatcaaatggttacacaatggtagagagttgacaggcagagagcctggcatttctatcttggaagatggcacattgctggttattgcttctgttacaccctatgacaatggggagtacatctgtgtggcagtcaatgaagctggaaccacagaaagaaaatataacctcaaagtccatgttcctccagtaattaaagataaagaacaagttacaaatgtgtcggtgttgttaaatcagctgaccaatctcttctgtgaagtggaaggcactccatctcccatcattatgtggtataaagataatgtccaggtgactgaaagcagcactattcagactgtgaacaatgggaagatactgaagctcttcagagccactccagaggatgcaggaagatattcctgcaaagcaattaatattgcaggcacttctcagaagtactttaacattgatgtgctagttccacccaccataataggtaccaacttcccaaatgaagtctcagttgtcctcaaccgtgacgtcgcccttgaatgccaggtcaaaggcactccctttcctgatattcattggttcaaagatggcaagcctttatttttgggcgatcctaatgttgaacttctagacagaggacaagtcttacatttaaagaatgcacggagaaatgacaaggggcgctaccaatgtactgtgtctaatgcagctggcaaacaagccaaggatataaaactgactatctatattccacctagtattaaaggaggaaatgtcaccacagacatatcagtattgatcaacagccttattaaactggaatgtgaaacacggggacttccaatgcctgccattacttggtataaggacgggcagccaatcatgtccagctcacaagcactttatattgataaaggacaatatcttcatattcctcgagcacaggtctctgattcagcaacatatacgtgtcatgtagccaatgttgctggaactgctgaaaaatcattccatgtggatgtctatgttcctccaatgattgaaggcaacttggccacgcctttgaataagcaagtagttattgctcattctctgacactggagtgcaaagctgctggaaacccttctcccattctcacctggttgaaagatggtgtacctgtgaaagctaatgacaatatccgcatagaagctggtgggaagaaactcgaaatcatgagtgcccaagaaattgatcgaggacagtacatatgcgtggctaccagtgtggcaggagaaaaggaaatcaaatatgaagttgatgtcttggtgccaccagctatagaaggaggagatgaaacatcttacttcattgtgatggttaataacttactggagctagattgtcatgtgacaggctctcccccaccaactatcatgtggctgaaggatggccagttaattgatgaaagggatggattcaagattttattaaatggacgcaaactggttattgctcaggctcaagtgtcaaacacaggcctttatcggtgcatggcagcaaatactgctggagaccacaagaaggaatttgaagtgactgttcatgttcctccaacaatcaagtcctcaggcctttctgagagagttgtggtaaaatacaagcctgtcgccttgcagtgcatagccaatgggattccaaatccttccattacatggttaaaagatgaccagcctgtgaacactgcccaaggaaaccttaaaatacagtcttctggtcgagttctacaaattgccaaaaccctgttggaagatgctggcagatacacatgtgtggctaccaacgcagctggagaaacacaacagcacattcaactgcatgttcatgaaccacctagtctggaagatgctggaaaaatgctgaatgagactgtgttggtgagcaaccctgtacagctggagtgtaaggcagctggaaatcctgtgcctgttattacatggtacaaagataatcgtctactctcaggttccaccagcatgactttcttgaacagaggacagatcattgatattgaaagtgcccagatctcagatgctggcatatataaatgcgtggccatcaactcagctggagctacagagttattttacagtctgcaagttcatgtggccccatcaatttctggcagcaataacatggtggcagtggtggttaataacccggtgaggttagaatgtgaagccagaggtattcctgccccaagtctgacctggttgaaagatgggagtcctgtttctagtttttctaatggattacaggttctctctggtggtcgaatcctagcattgaccagtgcacaaatcagcgacacaggaaggtacacctgcgtggcagtgaatgctgctggagaaaagcaaagggacattgacctccgagtatatgttccgccaaatattatgggagaagaacagaatgtctctgtcctcattagccaagctgtggaattactatgtcaaagtgatgctattcccccacctactcttacttggttaaaagacggccaccccttgctgaagaaaccaggcctcagtatatctgaaaatagaagtgtgttaaagattgaagatgctcaggttcaagacactggtcgttacacttgtgaagcaacaaatgttgctggaaaaactgaaaaaaactacaatgtcaacatttgggtccccccaaatattggtggttctgatgaacttactcaacttacagtcattgaagggaatctcattagtctgttgtgtgaatcaagtggtattccacccccaaatctcatctggaagaagaaaggctctccagtgctgactgattccatggggcgagttagaattttatctgggggcaggcaattacaaatttcaattgctgaaaagtctgatgcagcactctattcatgtgtggcgtcgaatgttgctgggactgcaaagaaagaatacaatctgcaagtttacattagaccaaccataaccaacagtggcagccaccctactgaaattattgtgacccgagggaagagtatctccttggagtgtgaggtgcagggtattccaccaccaacagtgacctggatgaaagatggccaccccttgatcaaggcaaagggagtagaaatactggatgaaggtcacatccttcagctgaagaacattcatgtatctgacacaggccgttatgtgtgtgttgctgtgaatgtagcaggaatgactgacaaaaaatatgacttaagtgtccatgctcctccaagcatcataggaaaccacaggtcacctgaaaatattagtgtggtagaaaagaactcagtatctttgacttgtgaagcttctggaattcccctgccttccataacctggttcaaagatgggtggcctgtcagccttagcaattctgtgaggattctttcaggaggcaggatgctacggctgatgcagaccacaatggaagatgctggccaatatacttgcgttgtaaggaatgcagctggtgaagaaagaaaaatctttgggctttcagtattagtaccacctcatattgtgggtgaaaatacattggaagatgtgaaggtaaaagagaaacagagtgttacgctgacttgtgaagtgacagggaatccagtgccagaaattacatggcacaaagatgggcagcccctccaagaagatgaagcccatcacattatatctggtggccgttttcttcaaattaccaatgtccaggtgccacacactggaagatatacatgtttggcttccagtccagctggccacaagagcaggagcttcagtcttaatgtatttgtatctcctacaattgctggtgtaggtagtgatggcaaccctgaagatgtcactgtcatccttaacagccctacatctttggtctgtgaagcttattcatatcctccagctaccatcacctggtttaaggatggcactcctttagaatctaaccgaaatattcgtattcttccaggaggcagaactctgcagatcctcaatgcacaggaggacaatgctggaagatactcttgtgtagccacgaatgaggctggagaaatgataaagcactatgaagtgaaggtgtacattccacccataatcaataaaggggacctttgggggccaggtctttcccctaaagaagtgaagatcaaagtaaacaacactctgaccttggaatgtgaagcgtatgcaattccttctgcctccctcagctggtacaaggatggacagccccttaaatccgatgatcatgttaatattgctgcgaatggacacacacttcaaataaaggaggctcaaatatcagacaccggacgatatacttgtgtagcatctaacattgcaggtgaagatgagttggattttgatgtgaatattcaagttcctccaagttttcagaaactctgggaaataggaaacatgctagatactggcaggaatggtgaagccaaagatgtgatcatcaacaatcccatttctctttactgtgagacaaatgctgctccccctcctacactgacatggtacaaagatggccaccctctgacctcaagtgataaagtattgattttgccaggagggcgagtgttgcagattcctcgggctaaagtagaagatgctgggagatacacatgtgtggctgtgaatgaggctggagaagattcccttcaatatgatgtccgtgtactcgtgccgccaattatcaagggagcaaatagtgatctccctgaagaggtcaccgtgctggtgaacaagagtgcactgatagagtgtttatccagtggcagcccagcaccaaggaattcctggcagaaagatggacagcccttgctagaagatgaccatcataaatttctatctaatggacgaattctgcagattctgaatactcaaataacagatatcggcaggtatgtgtgtgttgctgagaacacagctgggagtgccaaaaaatattttaacctcaatgttcatgttcctccaagtgtcattggtcctaaatctgaaaatcttaccgtcgtggtgaacaatttcatctctttgacctgtgaggtctctggttttccacctcctgacctcagctggctcaagaatgaacagcccatcaaactgaacacaaatactctcattgtgcctggtggtcgaactctacagattattcgggccaaggtatcagatggtggtgaatacacttgtatagctatcaatcaagctggcgaaagcaagaaaaagttttccctgactgtttatgtgcccccaagcattaaagaccatgacagtgaatctctttctgtagttaatgtaagagagggaacttctgtgtctttggagtgtgagtcgaacgctgtgccacctccagtcatcacttggtataagaatgggcggatgataacagagtctactcatgtggagattttagctgatggacaaatgctacacattaagaaagctgaggtatctgacacaggccagtatgtatgtagagctataaatgtagcaggacgggatgataaaaatttccacctcaatgtatatgtgccacccagtattgaaggacctgaaagagaagtgattgtggagacgatcagcaatcctgtgacattaacatgtgatgccactgggatcccacctcccacgatagcatggttaaagaaccacaagcgcatagaaaattctgactcactggaagttcgtattttgtctggaggtagcaaactccagattgcccggtctcagcattcagatagtggaaactatacatgtattgcttcaaatatggagggaaaagcccagaaatattactttctttcaattcaagttcctccaagtgttgctggtgctgaaattccaagtgatgtcagtgtccttctaggagaaaatgttgagctggtctgcaatgcaaatggcattcctactccacttattcaatggcttaaagatggaaagcccatagctagtggtgaaacagaaagaatccgagtgagtgcaaatggcagcacattaaacatttatggagctcttacatctgacacggggaaatacacatgtgttgctactaatcccgctggagaagaagaccgaatttttaacttgaatgtctatgttacacctacaattaggggtaataaagatgaagcagagaaactaatgactttagtggatacttcaataaatattgaatgcagagccacagggacgcctccaccacagataaactggctgaagaatggacttcctctgcctctctcctcccatatccggttactggcagcaggacaagttatcaggattgtgagagctcaggtgtctgatgtcgctgtgtatacttgtgtggcctccaacagagctggggtggataataagcattacaatcttcaagtgtttgcaccaccaaatatggacaattcaatggggacagaggaaatcacagttctcaaaggtagttccacctctatggcatgcattactgatggaaccccagctcccagtatggcctggcttagagatggccagcctctggggcttgatgcccatctgacagtcagcacccatggaatggtcctgcagctcctcaaagcagagactgaagattcgggaaagtacacctgcattgcctcaaatgaagctggagaagtcagcaagcactttatcctcaaggtcctagaaccacctcacattaatggatctgaagaacatgaagagatatcagtaattgttaataacccacttgaacttacctgcattgcttctggaatcccagcccctaaaatgacctggatgaaagatggccggccccttccacagacggatcaagtgcaaactctaggaggaggagaggttcttcgaatttctactgctcaggtggaggatacaggaagatatacatgtctggcatccagtcctgcaggagatgatgataaggaatatctagtgagagtgcatgtacctcctaatattgctggaactgatgagccccgggatatcactgtgttacggaacagacaagtgacattggaatgcaagtcagatgcagtgcccccacctgtaattacttggctcagaaatggagaacggttacaggcaacacctcgagtgcgaatcctatctggagggagatacttgcaaatcaacaatgctgacctaggtgatacagccaattatacctgtgttgccagcaacattgcaggaaagactacaagagaatttattctcactgtaaatgttcctccaaacataaaggggggcccccagagccttgtaattcttttaaataagtcaactgtattggaatgcatcgctgaaggtgtgccaactccaaggataacatggagaaaggatggagctgttctagctgggaatcatgcaagatattccatcttggaaaatggattccttcatattcaatcagcacatgtcactgacactggacggtatttgtgtatggccaccaatgctgctggaacagatcgcaggcgaatagatttacaggtccatgttcctccatctattgctccgggtcctaccaacatgactgtaatagtaaatgttcaaactactctggcttgtgaggctactgggataccaaaaccatcaatcaattggagaaaaaatgggcatcttcttaatgtggatcaaaatcagaactcatacaggctcctttcttcaggttcactagtaattatttccccttctgtggatgacactgcaacctatgaatgtactgtgacaaacggtgctggagatgataaaagaactgtggatctcactgtccaagttccaccttccatagctgatgagcctacagatttcctagtaaccaaacatgccccagcagtaattacctgcactgcttcgggagttccatttccctcaattcactggaccaaaaatggtataagactgcttcccaggggagatggctatagaattctgtcctcaggagcaattgaaatacttgccacccaattaaaccatgctggaagatacacttgtgtcgctaggaatgcggctggctctgcacatcgacacgtgacccttcatgttcatgagcctccagtcattcagccccaaccaagtgaactacacgtcattctgaacaatcctattttattaccatgtgaagcaacagggacacccagtcctttcattacttggcaaaaagaaggcatcaatgttaacacttcaggcagaaaccatgcagttcttcctagtggcggcttacagatctccagagctgtccgagaggatgctggcacttacatgtgtgtggcccagaacccggctggtacagccttgggcaaaatcaagttaaatgtccaagttcctccagtcattagccctcatctaaaggaatatgttattgctgtggacaagcccatcacgttatcctgtgaagcagatggcctccctccgcctgacattacatggcataaagatgggcgtgcaattgtggaatctatccgccagcgcgtcctcagctctggctctctgcaaatagcatttgtccagcctggtgatgctggccattacacgtgcatggcagccaatgtagcaggatcaagcagcacaagcaccaagctcaccgtccatgtaccacccaggatcagaagtacagaaggacactacacggtcaatgagaattcacaagccattcttccatgcgtagctgatggaatccccacaccagcaattaactggaaaaaagacaatgttcttttagctaacttgttaggaaaatacactgctgaaccatatggagaactcattttagaaaatgttgtgctggaggattctggcttctatacctgtgttgctaacaatgctgcaggtgaagatacacacactgtcagcctgactgtgcatgttctccccacttttactgaacttcctggagacgtgtcattaaataaaggagaacagctacgattaagctgtaaagctactggtattccattgcccaaattaacatggaccttcaataacaatattattccagcccactttgacagtgtgaatggacacagtgaacttgttattgaaagagtgtcaaaagaggattcaggtacttatgtgtgcaccgcagagaacagcgttggctttgtgaaggcaattggatttgtttatgtgaaagaacctccagtcttcaaaggtgattatccttctaactggattgaaccacttggtgggaatgcaatcctgaattgtgaggtgaaaggagaccccaccccaaccatccagtggaacagaaagggagtggatattgaaattagccacagaatccggcaactgggcaatggctccctggccatctatggcactgttaatgaagatgccggtgactatacatgtgtagctaccaatgaagctggggtggtggagcgcagcatgagtctgactctgcaaagtcctcctattatcactcttgagccagtggaaactgttattaatgctggtggcaaaatcatattgaattgtcaggcaactggagagcctcaaccaaccattacatggtcccgtcaagggcactctatttcctgggatgaccgggttaacgtgttgtccaacaactcattatatattgctgatgctcagaaagaagatacctctgaatttgaatgtgttgctcgaaacttaatgggttctgtccttgtcagagtgccagtcatagtccaggttcatggtggattttcccagtggtctgcatggagagcctgcagtgtcacctgtggaaaaggcatccaaaagaggagtcgtctgtgcaaccagccccttccagccaatggtgggaagccctgccaaggttcagatttggaaatgcgaaactgtcaaaataagccttgtccagtggatggtagctggtcggaatggagtctttgggaagaatgcacaaggagctgtggacgcggcaaccaaaccaggaccaggacttgcaataatccatcagttcagcatggtgggcggccatgtgaagggaatgctgtggaaataattatgtgcaacattaggccttgcccagttcatggagcatggagcgcttggcagccttggggaacatgcagcgaaagttgtgggaaaggtactcagacaagagcaagactttgtaataacccaccaccagcgtttggtgggtcctactgtgatggagcagaaacacagatgcaagtttgcaatgaaagaaattgtccaattcatggcaagtgggcgacttgggccagttggagtgcctgttctgtgtcatgtggaggaggtgccagacagagaacaaggggctgctccgaccctgtgccccagtatggaggaaggaaatgcgaagggagtgatgtccagagtgatttttgcaacagtgacccttgcccaacccatggtaactggagtccttggagtggctggggaacatgcagccggacgtgtaacggagggcagatgcggcggtaccgcacatgtgataaccctcctccctccaatgggggaagagcttgtgggggaccagactcccagatccagaggtgcaacactgacatgtgtcctgtggatggaagttggggaagctggcatagttggagccagtgctctgcctcctgtggaggaggtgaaaagactcggaagcggctgtgcgaccatcctgtgccagttaaaggtggccgtccctgtcccggagacactactcaggtgaccaggtgcaatgtacaagcatgtccaggtgggccccagcgagccagaggaagtgttattggaaatattaatgatgttgaatttggaattgctttccttaatgccacaataactgatagccctaactctgatactagaataatacgtgccaaaattaccaatgtacctcgtagtcttggttcagcaatgagaaagatagtttctattctaaatcccatttattggacaacagcaaaggaaataggagaagcagtcaatggctttaccctcaccaatgcagtcttcaaaagagaaactcaagtggaatttgcaactggagaaatcttgcagatgagtcatattgcccggggcttggattccgatggttctttgctgctagatatcgttgtgagtggctatgtcctacagcttcagtcacctgctgaagtcactgtaaaggattacacagaggactacattcaaacaggtcctgggcagctgtacgcctactcaacccggctgttcaccattgatggcatcagcatcccatacacatggaaccacaccgttttctatgatcaggcacagggaagaatgcctttcttggttgaaacacttcatgcatcctctgtggaatctgactataaccagatagaagagacactgggttttaaaattcatgcttcaatatccaaaggagatcgcagtaatcagtgcccctccgggtttaccttagactcagttggacctttttgtgctgatgaggatgaatgtgcagcagggaatccctgctcccatagctgccacaatgccatggggacttactactgctcctgccctaaaggcctcaccatagctgcagatggaagaacttgtcaagatattgatgagtgtgctttgggtaggcatacctgccacgctggtcaggactgtgacaatacgattggatcttatcgctgtgtggtccgttgtggaagtggctttcgaagaacctctgatgggctgagttgtcaagatattaatgaatgtcaagaatccagcccctgtcaccagcgctgtttcaatgccataggaagtttccattgtggatgtgaacctgggtatcagctcaaaggcagaaaatgcatggatgtgaacgagtgtagacaaaatgtatgcagaccagatcagcactgtaagaacacccgtggtggctataagtgcattgatctttgtccaaatggaatgaccaaggcagaaaatggaacctgtattgatattgatgaatgtaaagatgggacccatcagtgcagatataaccagatatgtgagaatacaagaggcagctatcgttgtgtatgcccaagaggttatcggtctcaaggagttggaagaccctgcatggacattaatgaatgtgaacaagtgcctaaaccttgtgcacatcagtgctccaacacccccggcagcttcaagtgtatctgtccaccaggacaacatttattaggggacgggaaatcttgcgctggattggagaggctgccaaattatggcactcaatacagtagctataaccttgcacggttctcccctgtgagaaacaactatcaacctcaacagcattacagacagtactcacatctctacagctcctactcagagtatagaaacagcagaacatctctctccaggactagaaggactattaggaaaacttgccctgaaggctctgaggcaagccatgacacatgtgtagatattgatgaatgtgaaaatacagatgcctgccagcatgagtgtaagaatacctttggaagttatcagtgcatctgcccacctggctatcaactcacacacaatggaaagacatgccaagatatcgatgaatgtctggagcagaatgtgcactgtggacccaatcgcatgtgcttcaacatgagaggaagctaccagtgcatcgatacaccctgtccacccaactaccaacgggatcctgtttcagggttctgcctcaagaactgtccacccaatgatttggaatgtgccttgagcccatatgccttggaatacaaactcgtctccctcccatttggaatagccaccaatcaagatttaatccggctggttgcatacacacaggatggagtgatgcatcccaggacaactttcctcatggtagatgaggaacagactgttccttttgccttgagggatgaaaacctgaaaggagtggtgtatacaacacgaccactacgagaagcagagacctaccgcatgagggtccgagcctcatcctacagtgccaatgggaccattgaatatcagaccacattcatagtttatatagctgtgtccgcctatccatactaa

SEQ ID NO: 400 - DNA, 3696 bp, Homo sapiens
  source 1..3696: mol_type = genomic DNA
atgagacttctagcaaagattatttgccttatgttatgggctatttgtgtagcagaagattgcaatgaacttcctccaagaagaaatacagaaattctgacaggttcctggtctgaccaaacatatccagaaggcacccaggctatctataaatgccgccctggatatagatctcttggaaatgtaataatggtatgcaggaagggagaatgggttgctcttaatccattaaggaaatgtcagaaaaggccctgtggacatcctggagatactccttttggtacttttacccttacaggaggaaatgtgtttgaatatggtgtaaaagctgtgtatacatgtaatgaggggtatcaattgctaggtgagattaattaccgtgaatgtgacacagatggatggaccaatgatattcctatatgtgaagttgtgaagtgtttaccagtgacagcaccagagaatggaaaaattgtcagtagtgcaatggaaccagatcgggaataccattttggacaagcagtacggtttgtatgtaactcaggctacaagattgaaggagatgaagaaatgcattgttcagacgatggtttttggagtaaagagaaaccaaagtgtgtggaaatttcatgcaaatccccagatgttataaatggatctcctatatctcagaagattatttataaggagaatgaacgatttcaatataaatgtaacatgggttatgaatacagtgaaagaggagatgctgtatgcactgaatctggatggcgtccgttgccttcatgtgaagaaaaatcatgtgataatccttatattccaaatggtgactactcacctttaaggattaaacacagaactggagatgaaatcacgtaccagtgtagaaatggtttttatcctgcaacccggggaaatacagcaaaatgcacaagtactggctggatacctgctccgagatgtaccttgaaaccttgtgattatccagacattaaacatggaggtctatatcatgagaatatgcgtagaccatactttccagtagctgtaggaaaatattactcctattactgtgatgaacattttgagactccgtcaggaagttactgggatcacattcattgcacacaagatggatggtcgccagcagtaccatgcctcagaaaatgttattttccttatttggaaaatggatataatcaaaatcatggaagaaagtttgtacagggtaaatctatagacgttgcctgccatcctggctacgctcttccaaaagcgcagaccacagttacatgtatggagaatggctggtctcctactcccagatgcatccgtgtcaaaacatgttccaaatcaagtatagatattgagaatgggtttatttctgaatctcagtatacatatgccttaaaagaaaaagcgaaatatcaatgcaaactaggatatgtaacagcagatggtgaaacatcaggatcaattacatgtgggaaagatggatggtcagctcaacccacgtgcattaaatcttgtgatatcccagtatttatgaatgccagaactaaaaatgacttcacatggtttaagctgaatgacacattggactatgaatgccatgatggttatgaaagcaatactggaagcaccactggttccatagtgtgtggttacaatggttggtctgatttacccatatgttatgaaagagaatgcgaacttcctaaaatagatgtacacttagttcctgatcgcaagaaagaccagtataaagttggagaggtgttgaaattctcctgcaaaccaggatttacaatagttggacctaattccgttcagtgctaccactttggattgtctcctgacctcccaatatgtaaagagcaagtacaatcatgtggtccacctcctgaactcctcaatgggaatgttaaggaaaaaacgaaagaagaatatggacacagtgaagtggtggaatattattgcaatcctagatttctaatgaagggacctaataaaattcaatgtgttgatggagagtggacaactttaccagtgtgtattgtggaggagagtacctgtggagatatacctgaacttgaacatggctgggcccagctttcttcccctccttattactatggagattcagtggaattcaattgctcagaatcatttacaatgattggacacagatcaattacgtgtattcatggagtatggacccaacttccccagtgtgtggcaatagataaacttaagaagtgcaaatcatcaaatttaattatacttgaggaacatttaaaaaacaagaaggaattcgatcataattctaacataaggtacagatgtagaggaaaagaaggatggatacacacagtctgcataaatggaagatgggatccagaagtgaactgctcaatggcacaaatacaattatgcccacctccacctcagattcccaattctcacaatatgacaaccacactgaattatcgggatggagaaaaagtatctgttctttgccaagaaaattatctaattcaggaaggagaagaaattacatgcaaagatggaagatggcagtcaataccactctgtgttgaaaaaattccatgttcacaaccacctcagatagaacacggaaccattaattcatccaggtcttcacaagaaagttatgcacatgggactaaattgagttatacttgtgagggtggtttcaggatatctgaagaaaatgaaacaacatgctacatgggaaaatggagttctccacctcagtgtgaaggccttccttgtaaatctccacctgagatttctcatggtgttgtagctcacatgtcagacagttatcagtatggagaagaagttacgtacaaatgttttgaaggttttggaattgatgggcctgcaattgcaaaatgcttaggagaaaaatggtctcaccctccatcatgcataaaaacagattgtctcagtttacctagctttgaaaatgccatacccatgggagagaagaaggatgtgtataaggcgggtgagcaagtgacttacacttgtgcaacatattacaaaatggatggagccagtaatgtaacatgcattaatagcagatggacaggaaggccaacatgcagagacacctcctgtgtgaatccgcccacagtacaaaatgcttatatagtgtcgagacagatgagtaaatatccatctggtgagagagtacgttatcaatgtaggagcccttatgaaatgtttggggatgaagaagtgatgtgtttaaatggaaactggacggaaccacctcaatgcaaagattctacaggaaaatgtgggccccctccacctattgacaatggggacattacttcattcccgttgtcagtatatgctccagcttcatcagttgagtaccaatgccagaacttgtatcaacttgagggtaacaagcgaataacatgtagaaatggacaatggtcagaaccaccaaaatgcttacatccgtgtgtaatatcccgagaaattatggaaaattataacatagcattaaggtggacagccaaacagaagctttattcgagaacaggtgaatcagttgaatttgtgtgtaaacggggatatcgtctttcatcacgttctcacacattgcgaacaacatgttgggatgggaaactggagtatccaacttgtgcaaaaagatag

SEQ ID NO: 401 - DNA, 4221 bp, Homo sapiens
  source 1..4221: mol_type = genomic DNA
atggcacttaagaacattaactaccttctcatcttctacctcagtttctcactgcttatctacataaaaaattccttttgcaataaaaacaacaccaggtgcctctcaaattcttgccaaaacaattctacatgcaaagatttttcaaaagacaatgattgttcttgttcagacacagccaataatttggacaaagactgtgacaacatgaaagacccttgcttctccaatccctgtcaaggaagtgccacttgtgtgaacaccccaggagaaaggagctttctgtgcaaatgtcctcctgggtacagtgggacaatctgtgaaactaccattggttcctgtggcaagaactcctgccaacatggaggtatttgccatcaggaccctatttatcctgtctgcatctgccctgctggatatgctggaagattctgtgagatagatcacgatgagtgtgcttccagcccttgccaaaatggggccgtgtgccaggatggaattgatggttactcctgcttctgtgtcccaggatatcaaggcagacactgcgacttggaagtggatgaatgtgcttcagatccctgcaagaacgaggctacatgcctcaatgaaataggaagatatacttgtatctgtccccacaattattctggtgtaaactgtgaattggaaattgacgaatgttggtcccagccttgtttaaatggtgcaacttgtcaggatgctctgggggcctatttctgcgactgtgcccctggattcctgggggatcactgtgaactcaacactgatgagtgtgccagtcaaccttgtctccatggagggctgtgtgtggatggagaaaacagatatagctgtaactgcacgggtagtggattcacagggacacactgtgagaccttgatgcctctttgttggtcaaaaccttgtcacaataatgctacatgtgaggacagtgttgacaattacacttgtcactgctggcctggatacacaggtgcccagtgtgagatcgacctcaatgaatgcaatagtaacccctgccagtccaatggggaatgtgtggagctgtcctcagagaaacaatatggacgcatcactggactgccttcttctttcagctaccatgaagcctcaggttatgtctgtatctgtcagcctggattcacaggaatccactgcgaagaagacgtcaatgaatgttcttcaaacccttgccaaaatggtggtacttgtgagaacttgcctgggaattatacttgccattgcccatttgataacctttctagaactttttatggaggaagggactgttctgatattctcctgggctgtacccatcagcaatgtctaaataatggaacatgcatccctcacttccaagatggccagcatggattcagctgcctatgtccatctggctacaccgggtccctgtgtgaaatcgcaaccacactttcatttgagggcgatggcttcctgtgggtcaaaagtggctcagtgacaaccaagggctcagtttgtaacatagccctcaggtttcagactgttcagccaatggctcttctacttttccgaagcaacagggatgtgtttgtgaagctggagctgctaagtggctacattcacttatcaattcaggtcaataatcagtcaaaggtgcttctgttcatttcccacaacaccagcgatggagagtggcatttcgtggaggtaatatttgcagaggctgtgacccttaccttaatcgacgactcctgtaaggagaaatgcatcgcgaaagctcctactccacttgaaagtgatcaatcaatatgtgcttttcagaactcctttttgggtggtttaccagtgggaatgaccagcaatggtgttgctctgcttaacttctataatatgccatccacaccttcgtttgtaggctgtctccaagacattaaaattgattggaatcacattaccctggagaacatctcgtctggctcatcattaaatgtcaaggcaggctgtgtgagaaaggattggtgtgaaagccaaccttgtcaaagcagaggacgctgcatcaacttgtggctgagttaccagtgtgactgccacaggccctatgaaggccccaactgtctgagagagtatgtggcaggcagatttggccaggatgactccactggttatgtcatctttactcttgatgagagctatggagacaccatcagcctctccatgtttgtccgaacgcttcaaccatcaggcttacttctagctttggaaaacagcacttatcaatatatccgtgtctggctagagcgcggcagactagcaatgctgactccaaactctcccaaattagtagtaaaatttgttcttaatgatggaaatgtccacttgatatctttgaaaatcaagccatataaaattgaactgtatcagtcttcacaaaacctaggatttatttctgcttctacgtggaaaatcgaaaagggagatgtcatctacattggtggcctacctgacaagcaagagactgaacttaatggtggattcttcaaaggctgtatccaagatgtaagactaaacaaccaaaatctggaattctttccaaatccaacaaacaatgcatctctcaatccagttcttgtcaatgtaacccaaggctgtgctggagacaacagctgcaagtccaacccctgtcacaatggaggtgtttgccattcccggtgggatgacttctcctgttcctgtcctgccctcacaagtgggaaagcctgtgaggaggttcagtggtgtggattcagcccgtgtcctcacggagcccagtgccagccggtgcttcaaggatttgaatgtattgcaaatgctgtttttaatggacaaagcggtcaaatattattcagaagcaatgggaatattaccagagaactcaccaatatcacatttggtttcagaacaagggatgcaaatgtaataatattgcatgcagaaaaagagcctgaatttcttaatattagcattcaagattccagattattctttcaattgcaaagtggcaacagcttttatatgctaagtctgacaagtttgcagtcagtgaatgatggcacatggcacgaagtgaccctttccatgacagacccactgtcccagacctccaggtggcaaatggaagtggacaacgaaacaccttttgtgaccagcacaattgctactggaagcctcaactttttgaaggataatacagatatttatgtgggagacagagctattgacaatataaagggcctgcaagggtgtctaagtacaatagaaatcggaggcatttatctctcttactttgaaaatgttcatggtttcattaataaacctcaggaagagcaatttctcaaaatctctaccaattcagtggtcactggctgtttgcagttaaatgtctgcaactccaacccctgtttgcatggaggaaactgtgaagacatctatagctcttatcattgctcctgtcccttgggatggtcagggaaacactgtgaactcaacatcgatgaatgcttttcaaacccctgtatccatggcaactgctctgacagagttgcagcctaccactgcacatgtgagcctggatacactggtgtgaactgtgaagtggatatagacaactgccagagtcaccagtgtgcaaatggagccacctgcattagtcatactaatggctattcttgcctctgttttggaaattttacaggaaaattttgcagacagagcagattaccctcaacagtctgtgggaatgagaagacaaatctcacttgctacaatggaggcaactgcacagagttccagactgaattaaaatgtatgtgccggccaggttttactggagaatggtgtgaaaaggacattgatgagtgtgcctctgatccgtgtgtcaatggaggtctgtgccaggacttactcaacaaattccagtgcctctgtgatgttgcctttgctggcgagcgctgcgaggtggacttggcagatgacttgatctccgacattttcaccactattggctcagtgactgtcgccttgttactgatcctcttgctggccattgttgcttctgttgtcacctccaacaaaagggcaactcagggaacctacagccccagccgtcaggagaaggagggctcccgagtggaaatgtggaacttgatgccaccccctgcaatggagagactgatttag

SEQ ID NO: 402 - DNA, 1128 bp, Homo sapiens
  source 1..1128: mol_type = genomic DNA
atgtcttcccacaaaggatctgtggtggcacaggggaatggggctcctgccagtaacagggaagctgacacggtggaactggctgaactgggacccctgctagaagagaagggcaaacgggtaatcgccaacccacccaaagctgaagaagagcaaacatgcccagtgccccaggaagaagaggaggaggtgcgggtactgacacttcccctgcaagcccaccacgccatggagaagatggaagagtttgtgtacaaggtctgggagggacgttggagggtcatcccatatgatgtgctccctgactggctaaaggacaacgactatctgctacatggtcatagacctcccatgccctcctttcgggcttgcttcaagagcatcttccgcattcatacagaaactggcaacatctggacccatctgcttggtttcgtgctgtttctctttttgggaatcttgaccatgctcagaccaaatatgtacttcatggcccctctacaggagaaggtggtttttgggatgttctttttgggtgcagtgctctgcctcagcttctcctggctctttcacaccgtctattgtcattcagagaaagtctctcggactttttccaaactggactattcagggattgctcttctaattatggggagctttgtcccctggctctattattccttctactgctccccacagccacggctcatctacctctccatcgtctgtgtcctgggcatttctgccatcattgtggcgcagtgggaccggtttgccactcctaagcaccggcagacaagagcaggcgtgttcctgggacttggcttgagtggcgtcgtgcccaccatgcactttactatcgctgagggctttgtcaaggccaccacagtgggccagatgggctggttcttcctcatggctgtgatgtacatcactggagctggcctttatgctgctcgaattcctgagcgcttctttcctggaaaatttgacatatggttccagtctcatcagattttccatgtcctggtggtggcagcagcctttgtccacttctatggagtctccaaccttcaggaattccgttacggcctagaaggcggctgtactgatgacacccttctctga

SEQ ID NO: 403 - DNA, 588 bp, Homo sapiens
  source 1..588: mol_type = genomic DNA
atgtctctcatctcatggcttcggtggaacgaggccccatcccggctgtccaccaggagccctgctgagatggtgctggagacgcttatgatggagctgacggggcagatgcgagaggctgagaggcagcagcgggagcgcagcaatgcggtcagaaaggtctgcaccggtgtggactacagctggctggccagcacaccccggtccacctatgacctcagccccattgagcggttgcagctggaagatgtctgcgttaagatccacccatcctattgtgggcctgctatcctcaggttccggcagctgctggcggagcaggagcccgaggtgcaggaggtgtcccagctcttccgctcggtgctgcaggaggtcctggagaggatgaagcaggaagaggaggcccacaagctgacgcgccagtggagcctgcggccccgcggcagcctggccaccttcaagacccgcgcgcgcatctcgcccttcgccagcgacatcaggaccatctccgaggacgtggagcgggacacaccgccgccactgcggtcctggagcatgcccgaattccgggcgcccaaagccgactga

SEQ ID NO: 404 - DNA, 1338 bp, Homo sapiens
  source 1..1338: mol_type = genomic DNA
atgccttcccgggctgaggactatgaagtgttgtacaccattggcacaggctcctacggccgctgccagaagatccggaggaagagtgatggcaagatattagtttggaaagaacttgactatggctccatgacagaagctgagaaacagatgcttgtttctgaagtgaatttgcttcgtgaactgaaacatccaaacatcgttcgttactatgatcggattattgaccggaccaatacaacactgtacattgtaatggaatattgtgaaggaggggatctggctagtgtaattacaaagggaaccaaggaaaggcaatacttagatgaagagtttgttcttcgagtgatgactcagttgactctggccctgaaggaatgccacagacgaagtgatggtggtcataccgtattgcatcgggatctgaaaccagccaatgttttcctggatggcaagcaaaacgtcaagcttggagactttgggctagctagaatattaaaccatgacacgagttttgcaaaaacatttgttggcacaccttattacatgtctcctgaacaaatgaatcgcatgtcctacaatgagaaatcagatatctggtcattgggctgcttgctgtatgagttatgtgcattaatgcctccatttacagcttttagccagaaagaactcgctgggaaaatcagagaaggcaaattcaggcgaattccataccgttactctgatgaattgaatgaaattattacgaggatgttaaacttaaaggattaccatcgaccttctgttgaagaaattcttgagaaccctttaatagcagatttggttgcagacgagcaaagaagaaatcttgagagaagagggcgacaattaggagagccagaaaaatcgcaggattccagccctgtattgagtgagctgaaactgaaggaaattcagttacaggagcgagagcgagctctcaaagcaagagaagaaagattggagcagaaagaacaggagctttgtgttcgtgagagactagcagaggacaaactggctagagcagaaaatctgttgaagaactacagcttgctaaaggaacggaagttcctgtctctggcaagtaatccagaacttcttaatcttccatcctcagtaattaagaagaaagttcatttcagtggggaaagtaaagagaacatcatgaggagtgagaattctgagagtcagctcacatctaagtccaagtgcaaggacctgaagaaaaggcttcacgctgcccagctgcgggctcaagccctgtcagatattgagaaaaattaccaactgaaaagcagacagatcctgggcatgcgctag

SEQ ID NO: 405 - DNA, 1668 bp, Homo sapiens
  source 1..1668: mol_type = genomic DNA
atggcgcggccagacgatgaggagggggcggcggtggcgcccggacacccgctcgcgaaaggatacctcccgttgccgaggggcgcgcccgttgggaaggagagcgtggagctgcagaacgggcccaaagcgggcaccttcccggtgaatggggccccccgggacagcctcgctgccgcctcgggagttctgggcgggcctcagactccactggccccagaagaggagacccaggcccggctgctgcctgcgggcgcgggagctgagaccccgggggccgagagcagcccgctgccccttacggcgctctccccgcggcgcttcgtggtgctcctgatcttcagcctgtactcgctggtcaacgcctttcagtggatccagtacagcatcattagcaacgtcttcgagggcttctacggtgtcaccttgctgcacatcgactggctgtccatggtgtacatgctggcctacgtgcccctcatcttcccggccacctggctgctggacaccagaggcctgcggctcaccgccctgctgggctccggcctcaactgcctgggtgcctggatcaagtgcggcagtgtgcagcagcatctcttctgggtcaccatgttgggccagtgcttgtgctcggtggcccaggtgttcatcctgggcttgccctcccgcatcgcctcagtgtggtttgggcccaaagaggtgtccacagcttgtgccaccgccgtgctgggcaatcagcttggaactgcagttggctttttgctaccaccagttttagtacccaacacacagaatgacacaaatctcctggcttgtaatatcagcaccatgttttatggaacatcagctgttgccacacttttatttattttaacagcaattgccttcaaagaaaaacctcggtatccaccaagtcaggctcaagcagctcttcaagacagtccccctgaagagtactcctataagaaatcaataagaaacctgtttaaaaacattccttttgtccttctgttgatcacttatggtatcatgactggtgccttttattcagtctcaacgttattaaatcaaatgatattgacatattatgagggagaagaagtcaatgctggaaggattgggctaacgctagtagtagctggaatggtgggctctattctttgtggcttatggctggattatactaaaacatacaaacagactactctgatagtttatattttgtcttttattggaatggttatctttactttcacattggaccttagatatattatcatcgtgtttgttactggaggggtgcttggcttcttcatgactggttacctccctttgggttttgaatttgctgttgaaatcacttaccctgaatctgaaggtacttcatctggtcttcttaatgcttctgcacagatatttggaattttgttcacattggctcaaggaaagctcacatcagactatggtcctaaggcagggaacatttttctctgtgtctggatgtttataggcatcatattaacagcattaatcaagtctgatctgcgaagacacaacataaatataggaattacaaatgttgatgttaaagctataccagctgacagtcccacagaccaagaaccaaaaacggttatgttgtccaagcagtcagaatcagcaatttga

SEQ ID NO: 406 - DNA, 15609 bp, Homo sapiens
  source 1..15609: mol_type = genomic DNA
atgaattgcccagttctttcattgggctctggcttcttgtttcaggtcattgaaatgttgatctttgcctattttgcttcaatatccttgactgagtcacgaggtcttttcccaaggctggagaacgtgggagctttcaagaaagtttccatcgtgccaacccaagcagtatgtggactcccagaccgaagcactttttgtcacagctctgctgctgctgaaagtattcagttctgtacccagcggttttgtattcaggattgcccatacagatcttcacaccctacctacactgcccttttctcagcaggcctcagtagctgcatcacaccagacaagaatgatctgcatcctaacgcccatagcaattctgcaagttttatttttggaaatcacaagagctgcttttcttctcctccttctccaaagctgatggcatcatttaccttagctgtatggctgaaacctgagcaacaaggtgtaatgtgtgttatagaaaagacagtagatgggcagattgtgttcaaacttacaatatctgagaaagagaccatgttttattatcgcacagtaaatggtttgcaacctccaataaaagtaatgacactggggagaattcttgtgaagaaatggattcatcttagtgtgcaggtgcatcagacaaaaatcagcttctttatcaatggcgtggagaaggatcatacacctttcaatgcaagaactctaagtggttcaattacagattttgcatctggtactgtgcaaataggacagagtttaaatggtttagagcagtttgtcggaagaatgcaagattttcgattataccaagtggcacttacaaacagagagattctggaagtcttctctggagatcttctcagattgcatgcccaatcacattgccgttgccctggcagccacccgcgggtccaccctttggcacagcggtactgcattcctaatgatgcaggagacacagctgataatagagtgtcacggttgaatcctgaagcccatcctctctcttttgtcaatgataatgatgttggtacttcatgggtttcaaatgtgtttacaaacattacacagcttaatcaaggagtgactatttcagttgatttggaaaatggacagtatcaggtgttttatattatcattcagttctttagtccacaaccaacggaaataaggattcaaaggaagaaggaaaatagtttagattgggaggactggcaatattttgccaggaattgtggtgcttttggaatgaaaaacaatggagatttggaaaaacctgattctgtcaactgtcttcagctttccaattttactccatattcccgtggcaatgtcacatttagcatcctgacacctggaccaaattatcgtcctggatacaataacttctataataccccatctcttcaagagttcgtaaaagccacgcaaataaggtttcattttcatgggcagtactatacaactgagactgctgttaacctcagacacagatattatgcagtggacgaaatcaccattagtgggagatgtcagtgccatggtcatgccgataactgcgacacaacaagccagccatatagatgcctctgctcccaggagagcttcactgaaggacttcattgtgatcgctgcttgcctctttataatgacaagcctttccgccaaggtgatcaagtttacgctttcaattgtaaaccttgtcaatgcaacagccattccaaaagctgccattacaacatctctgtagacccatttccttttgagcacttcagagggggaggaggagtttgtgatgattgtgagcataacactacaggaaggaactgtgagctgtgcaaggattactttttccgacaagttggtgcagatccttcggccatagatgtttgcaaaccctgtgactgtgatacagttggcactagaaatggtagcattctttgtgatcagattggaggacagtgtaattgtaagagacacgtgtctggcaggcagtgcaatcagtgccagaatggattctacaatctacaagagttggatcctgatggctgcagtccctgtaactgcaatacctctgggacagtggatggagatattacctgtcaccaaaattcaggccagtgcaagtgcaaagcaaacgttattgggcttaggtgtgatcattgcaattttggatttaaatttctccgaagctttaatgatgttggatgtgagccctgccagtgtaacctccatggctcagtgaacaaattctgcaatcctcactctgggcagtgtgagtgcaaaaaagaagccaaaggacttcagtgtgacacctgcagagaaaacttttatgggttagatgtcaccaattgtaaggcctgtgactgtgacacagctggatccctccctgggactgtctgtaatgctaagacagggcagtgcatctgcaagcccaatgttgaagggagacagtgcaataaatgtttggagggaaacttctacctacggcaaaataattctttcctctgtctgccttgcaactgtgataagactgggacaataaatggctctctgctgtgtaacaaatcaacaggacaatgtccttgcaaattaggggtaacaggtcttcgctgtaatcagtgtgagcctcacaggtacaatttgaccattgacaattttcaacactgccagatgtgtgagtgtgattccttggggacattacctgggaccatttgtgacccaatcagtggccagtgcctgtgtgtgcctaatcgtcaaggaagaaggtgtaatcagtgtcaaccaggtttttatatttctccaggcaatgccactggctgcctgccatgctcatgccatacaactggtgcagttaatcacatctgtaatagcctgactggtcagtgtgtttgccaagatgcttccattgctgggcaacgttgtgaccaatgcaaagaccattactttggatttgatcctcagactggaagatgtcagccttgtaattgtcatctctcaggagccttgaatgaaacctgtcacttggtcacaggccagtgtttctgtaaacaatttgtcactggctcaaagtgtgatgcttgtgttcccagtgcaagccacttggatgtcaacaatctattgggttgcagcaaaactccattccagcaacctccgcccagaggacaagttcaaagttcttctgctatcaatctctcctggagtccacctgattctccaaatgcccactggcttacttacagtttactcagggatggttttgaaatctacacaacagaggatcaatacccatacagtattcaatacttcttagacacagacctgttaccatataccaaatattcctattacattgagaccaccaatgtgcatggttcaacaaggagtgtagctgtcacttacaagacaaaaccaggggtcccagagggaaacttgactttaagttatatcattcctattggctcagactctgtgacacttacctggacaacactctcaaatcaatctggtcccatagagaaatatattttgtcctgtgcccctttggctggtggtcagccatgtgtttcctacgaaggtcatgaaacctcagctaccatctggaatctggttccatttgccaagtacgatttttctgtacaggcgtgtactagcgggggctgtttacacagcttgcccattacagtgaccacagcccaggcccctccccaaagactaagtccacctaagatgcagaaaatcagttctacagaacttcatgtagaatggtctccaccagcggaactaaatggaataattataagatatgaactatacatgagaagactgagatctactaaagaaaccacatctgaggaaagtcgagtttttcagagcagtggttggctcagtcctcattcatttgtagaatcggccaatgaaaatgcattaaaacctcctcaaacaatgacaaccatcactggcttggagccatacaccaagtatgagttcagagtcttagctgtgaatatggctggaagtgtgtcttctgcctgggtctcagaaagaacgggagaatcagcacctgtattcatgatccctccttcagtctttcccctctcttcgtactctctcaatatctcctgggagaagccagcagataatgttacaagaggaaaagttgtggggtatgacatcaatatgctttctgaacaatcacctcaacagtctattcccatggcgttttcacagctgttgcacactgctaaatcccaagaactatcttacactgtagaaggactgaaaccttataggatatatgagtttactattactctctgcaattcagttggttgtgtgaccagtgcttcgggagcaggacaaactttagcagcagcaccagcacaactgaggccacctctggttaaaggaatcaacagcacaacaatccatcttaggtggtttccacctgaagaactgaatggaccctctcctatatatcagctggaaaggagagagtcatctctaccagctctgatgaccacgatgatgaaaggaatccgtttcataggaaatgggtattgtaaatttcccagctccactcacccagtcaatacagacttcactggcattaaggccagctttcgaacaaaagtgcctgaaggtttgattgtctttgcagcatcacctggcaatcaggaagagtattttgcacttcagttgaagaagggacgtctttattttctttttgatcctcaggggtcaccagtggaagtaactacaactaatgatcatggcaaacaatatagtgatggaaaatggcatgaaataattgctattaggcatcaggcttttggccaaatcactctggatgggatatatacaggttcctctgccatcctgaatggtagtactgttattggagataacacaggagtctttctgggagggctcccgcgaagttataccatcctcaggaaggatcctgagataatccaaaaaggttttgtgggctgtctcaaggatgtacattttatgaagaattacaatccgtcagctatttgggaacctctggattggcagagttctgaagaacaaatcaacgtgtataacagctgggagggatgtcccgcttcattaaatgagggagctcagttcctaggagcagggttcctggaacttcatccatatatgtttcatggtggaatgaactttgagatttcctttaagttcagaactgaccaattaaatggattgcttcttttcgtttataacaaagatggacctgattttcttgctatggagctgaaaagtggaatattgaccttccggttaaataccagtcttgcctttacacaagtggatctattgctggggctatcctattgtaatggaaagtggaataaagtcattattaaaaaggaaggctctttcatatcagcaagtgtgaatggactgatgaagcatgcatcggagtccggagaccagccactggtggtgaattcaccagtttatgtgggaggaatcccacaggaactgctgaactcttatcaacatttgtgtttggaacaaggtttcggtggttgcatgaaggatgttaaatttacacggggtgctgtcgttaacttggcatctgtgtccagcggtgctgtcagagtcaatctggatggatgcctatcaactgacagtgctgttaactgcaggggaaatgactccatcctggtttaccagggaaaagagcagagtgtttacgagggtggtctccagccttttacagaatacctgtatcgagtgatagcctcgcatgaaggaggttcagtatatagtgattggagtcgaggacgtacaacaggagcagctccacaaagtgtgccaactccctcaagagtccgcagcttaaatggatacagcattgaggtgacctgggatgaacctgttgtcagaggtgtaattgagaagtacattctgaaagcctatagtgaggacagcacccgtccaccccgcatgccctctgccagtgctgaatttgtcaatacaagcaacctcacaggcatattgacaggcttgctacccttcaaaaactatgcagtaaccctaactgcttgcactttggctggctgtactgagagctcacatgcattgaacatctctactccacaagaagccccacaagaggttcagccaccagtagccaaatcccttcccagttctttgctgctctcctggaacccacccaaaaaggcaaatggtattataactcagtactgtttatacatggatgggaggctgatctattcaggcagtgaggagaactacatagtcacagatttagcagtatttacaccccaccagtttctactaagtgcatgcacacatgtgggctgtacaaacagttcctgggtcctactgtacacagcacagctgccaccagaacacgtggattccccagttctgactgtcctggattctagaactatacacatacagtggaaacaaccaagaaaaataagtgggattctggaacgctatgtattatatatgtcaaaccatacacatgattttacaatttggagtgtcatctataacagtacagaacttttccaggatcatatgctacaatacgttttacctggtaataaatatctcatcaagctgggagcttgcacaggtggtgggtgcacagtgagtgaggccagtgaggccctaactgacgaggacatacccgaaggcgtgccagcccccaaagcccactcatattcacctgactcctttaatgtctcctggactgagcctgaatatccgaatggtgttatcacgagttatggattatatctagatggtatattaatccacaattcctcagaactcagctatcgtgcttacggatttgctccttggagtttacattccttcagagtccaagcatgcacggccaaaggttgtgctctgggcccactggtggaaaatcgaactctagaagctcctcctgaaggaacagtaaatgtgtttgtcaaaacacagggatcccggaaagcccacgtgaggtgggaagcaccttttcgccctaatggactcttaacacactcagtccttttcactgggatattctatgtagacccagtaggtaataactacacccttctgaatgtcacaaaagtcatgtacagcggagaagagacaaacctttgggtgctcatcgatgggctggttccttttaccaactatactgtacaagtgaatatttcaaatagccaaggcagcttgataactgatcctataacaattgcaatgcctccaggagctccagatggcgtgctgcctcccaggctttcatctgccactccaaccagtcttcaggttgtctggtctacaccagctcgtaataacgctcctggctctcccagataccaactccagatgaggtctggcgactccacccatggatttctagagttattttccaatccttctgcatcgttaagctatgaagtgagtgatctccaaccgtacacagagtatatgtttcggttggttgcctccaatggatttggcagtgcacatagttcttggattccattcatgaccgcagaggacaaacctggacctgtagttcctccgattcttctggatgtgaagtcaagaatgatgttggtcacctggcagcatcctagaaaatccaatggggttattacccattataacatttatctacatggccgtctatacttgagaactcctggaaatgtcactaattgcacagtgatgcatttacacccatacactgcctataagtttcaggtagaagcctgcacttcaaaaggatgttccctttcaccagagtcccagactgtatggacactcccaggggcaccggaagggatcccaagtccagagctgttctctgatactccaacatctgtgattatatcttggcaaccccctacccaccccaatggcttggtggagaatttcacaattgagagaagagtcaaaggaaaggaagaagttactaccctggtgactctcccgaggagtcattccatgaggtttattgacaagacttctgctcttagcccatggacaaaatatgaatatcgggtactgatgagcactcttcatggaggcacaaacagcagtgcttgggtagaagttaccacaagaccctcacgacctgctggggtgcagccacctgtggtgacagtgctggaacccgatgcagtccaggtcacttggaaacccccactcatccagaacggagacatacttagctatgagattcacatgcctgaccctcacatcactttaaccaatgtgacttccgcagtgttaagtcaaaaagttactcatctgattcctttcactaattattctgtcaccattgttgcttgctcagggggtaatgggtaccttggagggtgcacagagagtttacctacctatgttaccactcaccccaccgtacctcagaatgttggcccattgtctgtgattccactaagtgaatcatatgttgtgatttcttggcaaccaccatccaagccaaatggacctaatttgagatatgagcttctgagacgtaaaatccagcagccacttgcatcaaatcccccagaagatttaaatcggtggcacaatatttattcaggaactcagtggctttatgaagataagggtcttagcaggtttacaacctatgaatatatgctcttcgtacacaacagtgtgggttttacaccgagccgagaagtgactgtgacaacgttagctggtcttccagagagaggagccaatctcactgcgagtgtccttaaccacacagccatcgacgtgaggtgggctaaaccaactgttcaagacctacaaggtgaagttgaatattacacacttttttggagttctgctacctcaaacgactctctaaaaatcttgccagatgtaaactctcatgtcattggccacctaaagccaaacacagagtattggatctttatctctgtcttcaatggagtccacagcatcaacagtgcaggacttcatgcaaccacttgcgatggggagcctcagggcatgcttcctccagaggttgtcatcatcaacagtacagctgtacgtgtcatctggacatctccttcaaacccaaatggtgttgtcactgagtattctatctatgtaaataataagctctacaagactggaatgaatgtgcctgggtcgtttattctgagagacctgtctcccttcactatctatgacattcaggttgaagtctgcacaatatatgcctgcgtgaaaagcaatggaacccaaattaccactgtggaagacactccaagtgatataccaacacccacaattcgtggcatcacttcaagatctcttcaaattgattgggtgtctccacggaagccaaatggcatcattcttggatatgatctcctatggaaaacatggtatccatgcgctaaaactcaaaagttagtgcaggatcagagtgatgagctctgcaaggcagtgaggtgtcaaaaacctgaatctatctgtggacacatttgctattcttctgaagctaaggtttgttgtaacggagtgctctataaccccaagcctggacatcgctgttgtgaagaaaagtatatcccgtttgttctgaattctactggagtttgttgtggtggccgaatacaggaggcacaaccaaatcatcagtgctgctctgggtattacgctagaattctaccaggtgaagtatgctgtccagatgaacagcacaatcgggtttctgttggcattggtgattcctgctgtggcagaatgccgtactccacctcaggaaaccagatttgctgtgctgggaggcttcatgatggccatggccagaagtgctgtggcagacagattgtgagcaacgatttagagtgttgtggtggagaagaaggagtggtgtacaatcgccttccaggtatgttctgttgtgggcaggattatgtgaatatgtcagataccatatgctgctcagcttccagtggagagtctaaagcacatattaaaaagaatgacccggtgccagtaaaatgctgtgagactgaacttattccaaagagccagaaatgctgtaatggagttggatataatcctttgaaatatgtttgctctgacaagatttcaactggaatgatgatgaaggaaaccaaagagtgcaggatcctctgcccagcatctatggaagccacagaacattgtggcaggtgtgacttcaactttaccagccacatttgcactgtgataagagggtctcacaattccacagggaaggcatcaattgaagaaatgtgttcatctgccgaagaaaccattcatacagggagtgtaaacacgtactcttacacagatgtgaacctcaagccctacatgacatatgagtacaggatttctgcctggaacagctatgggcgaggactcagcaaagctgtgagagccagaacaaaagaagatgtgcctcaaggagtgagtccccctacgtggaccaaaatagacaatcttgaagatacaattgtcttaaactggagaaaacctatacaatcaaatggtcctattatttactacatccttcttcgaaatggaattgaacgttttcggggaacatcactgagcttctctgataaagagggaattcaaccatttcaggaatattcatatcagctgaaagcttgcacggttgctggctgtgccaccagtagcaaggtagttgcagctactacccaaggagttccggagagcatcctgccaccaagcatcacagccctaagtgcagtggctctgcatctgagctggagtgtccctgagaaatcaaacggcgtcattaaagagtaccagatcaggcaggttgggaaaggtctcatccacactgacaccactgacaggagacagcatacggtcacaggtctccagccatacaccaactacagcttcactcttacagcttgtacatctgctgggtgcacttcaagcgagccttttctaggtcagacactgcaggcagctcctgaaggagtttgggtgacacctcgacacattatcatcaattctacaacagtggaattatattggagtctgccagaaaagcccaatggcctcgtttctcaatatcaattgagtcgtaatggaaacttgcttttcctgggtggcagtgaggagcagaatttcactgataaaaacctggagcccaatagcagatacacttacaagttagaagtcaaaactggaggtggcagcagtgctagtgatgattacattgttcaaacacctatgtcaacaccagaagaaatctatcctccatataatatcacagtaattgggccttattctatatttgtagcttggataccaccagggatcctcatccccgaaattcctgtggagtacaatgtcttactcaatgatggaagtgtaacacctctggccttctccgttggtcatcatcaatccacccttctggaaaatttgactccattcacacagtatgagataaggatacaagcatgtcaaaatggaagttgtggagttagcagtaggatgtttgtcaaaacacctgaagcagccccaatggatcttaattctcctgttcttaaggcactggggtcagcttgcatagagattaagtggatgccacctgaaaaaccaaatggaatcatcatcaactactttatttacagacgccctgctggcattgaagaggagtctgttttatttgtctggtcagaaggagcccttgaatttatggatgaaggagacaccctgaggcctttcacactctacgaatatcgggtcagagcctgtaactccaagggttcagtggagagtctgtggtcattaacacaaactctggaagctccacctcaagattttccagctccttgggctcaagccacgagtgctcattcagttctgttgaattggacaaagccagaatctcccaatggcattatctcccattaccgtgtggtctaccaggagagacccgacgatcctacatttaacagccctaccgtgcatgctttcacagtgaagggaacaagccatcaagcccacctgtacgggttagaaccattcacaacatatcgcattggtgttgtggctgcaaaccatgcaggagaaattttaagcccttggactctgattcaaaccttagaatcttccccaagtggactgagaaactttatagtagaacagaaagagaatggccgggcattgctactacagtggtcagaacctatgagaaccaatggtgtgattaagacatacaacatcttcagtgacgggttcctggagtactctggtttgaatcgtcagtttctcttccgccgcctggatcctttcactctctacacactgaccctggaggcctgcaccagagcaggttgtgcacactcggcgcctcagcctctgtggacagatgaagcccctccagactctcagctggctcctactgtccactctgtgaagtccaccagtgttgagctgagctggtctgagcctgttaacccaaatggaaaaataattcgctatgaagtgattcgcagatgcttcgagggaaaagcttggggaaatcagacaatccaggccgacgagaaaattgttttcacagaatataacactgaaaggaatacatttatgtataatgacacaggtttgcaaccatggacgcagtgtgaatataaaatctacacttggaattcagctgggcatacctgtagctcttggaatgtggtgaggacattgcaagcacctccagaaggtctctctccacctgtgatatcctatgtttctatgaatccccaaaaactgctgatttcctggatcccaccagaacagtctaatggtattatccagtcctataggcttcaaaggaatgaaatgctctatccttttagctttgatcctgtgactttcaattacactgatgaagagcttcttcctttttccacctatagctatgcactccaagcctgcacgagtggaggatgctccaccagcaaacccaccagcatcacaactctggaggctgctccatcagaagtcagccctccagatctttgggccgtcagtgccactcaaatgaatgtatgttggtcaccgcccacagtgcaaaatggaaagattactaaatatttagttagatatgataataaagagtcccttgctggccagggcctgtgcctgctggtttcccacctgcagccttactctcagtataacttctcccttgtagcctgcacgaatggaggttgcacagctagtgtgtcaaaatctgcctggacaatggaggccctgccagagaacatggactctccaacattgcaagtcacaggctcagaatcaatagaaatcacctggaaacctccaagaaacccaaatggccagatcagaagttatgaacttaggagggatggaaccattgtatatacaggcttggaaacacgctatcgtgattttactctcaccccaggtgtggagtatagctacacagtaactgccagcaacagccaagggggtattttgagtcctcttgtcaaagatcgaaccagcccctcagcaccctcagggatggaacctccaaaattgcaggccaggggtcctcaggagatcttagtgaactgggaccctccagtgagaacaaatggtgatatcatcaattataccctcttcatccgtgaactatttgaaagagaaactaaaatcatacacataaacacaactcataattcttttggtatgcagtcatatatagtaaaccagctgaagccatttcacaggtatgaaatacgaattcaagcgtgcaccaccctgggatgtgcatcaagtgactggacattcatacagacccctgagattgcacctttgatgcaaccccctccacatctggaggtacaaatggctccaggaggattccagccaactgtttctcttttgtggacaggaccgctgcagccaaatggaaaagttttgtattacgaattatacagaagacaaatagcaactcagcctagaaaatccaatccagtcctaatctataacggaagctcaacatcttttatagattccgaactattgcctttcacagagtatgagtatcaggtctgggcagtgaattctgcaggaaaagcccccagtagctggacatggtgcagaaccgggccagccccaccagaaggtctcagagcccccacgttccatgtgatctcttctacccaagcagtggtcaacatcagtgcccctgggaagcccaacgggatcgtcagtctctacaggctgttctccagcagcgcccatggggctgagacagtgctatccgaaggcatggccacccagcagactctccatggccttcaagccttcactaactactctattggagtagaggcctgcacctgcttcaactgttgcagcaaaggaccgacagctgaactgagaacccatcctgccccaccctcaggactgtcctctccacaaatcgggacgctggcctcaaggacggcctccttccggtggagtccccccatgttccccaatggtgtcattcacagctatgaactccaattccacgtggcttgccctcctgactcagccctcccctgtactcccagccaaatagaaacaaagtacacggggctggggcagaaagccagccttgggggtctccagccctacaccacatacaagctgagagtggtggcacacaacgaggtgggcagtacggcttccgagtggatcagtttcaccacccaaaaagaattgcctcagtaccgagccccattttcggtggacagcaatttgtctgtggtgtgtgtgaactggagtgacaccttcctcctgaacggccaactgaaggagtacgtgttaaccgacggagggcgacgcgtgtacagcggcttggacaccaccctctacataccgagaacggcggacaaaaccttctttttccaggtcatctgcacgactgacgaaggaagtgttaagacgccgttgatccaatatgatacctctactggacttggcttggtcctaacaactcctgggaaaaagaagggatcgcggagcaaaagcacagagttctacagcgagctgtggttcatagtgttaatggcgatgctgggcttgatcttgttggccatttttctgtccctgatactacaaagaaaaatccacaaagagccatatatcagagaaagacctcccttggtacctcttcagaagaggatgtctccattgaatgtttacccaccgggggaaaaccatatggggttagccgataccaaaattccccggtctgggacacctgtgagtatccgcagcaaccggagtgcatgtgtcctgcgcatcccgagtcaaaaccaaaccagcctaacctactcccagggttctcttcaccgcagcgtcagccagctcatggacattcaagacaagaaagtcttgatggacaactcactgtgggaagccatcatgggccacaacagtggactgtatgtggatgaagaggacctgatgaacgccatcaaggatttcagctcagtgactaaggaacgcaccacattcacagacacccacctgtaa

SEQ ID NO: 407 - DNA, 2142 bp, Homo sapiens
  source 1..2142: mol_type = genomic DNA
atggcgaagtccccggagaactctaccctggaggagattctggggcagtatcaacggagtctccgggaacatgccagcagaagcattcaccaactgacatgtgccctgaaagaaggcgatgtcactattggagaagatgcaccaaatctttcttttagcaccagtgtgggaaatgaggacgccaggacagcctggcccgaattacaacagagccatgctgttaatcagctcaaagatttgttgcgccaacaagcagataaggaaagtgaagtatctccgtcaagaagaagaaaaatgtcccccttgaggtcattagaacatgaggaaaccaatatgcctactatgcacgaccttgttcatactattaatgaccagtctcaatatattcatcatttagaggcagaagttaagttctgcaaggaggaactctctggaatgaaaaataaaatacaagtagttgtgcttgaaaacgaagggctccagcaacagctaaaatctcaaagacaagaggagacactgagggaacaaacacttctggatgcatccggaaacatgcacaattcttggattacaacaggtgaagattctggggtgggcgaaacctccaaaagaccattttcccatgacaatgcagattttggcaaagctgcatctgctggtgagcagctagaactggagaagctaaaacttacttatgaggaaaagtgtgaaattgaggaatcccaattgaagtttttgaggaacgacttagctgaatatcagagaacttgtgaagatcttaaagagcaactaaagcataaagaatttcttctggctgctaatacttgtaaccgtgttggtggtctttgtttgaaatgtgctcagcatgaagctgttctttcccaaacccatactaatgttcatatgcagaccatcgaaagactggttaaagaaagagatgacttgatgtctgcactagtttccgtaaggagcagcttggcagatacgcagcaaagagaagcaagtgcttatgaacaggtgaaacaagttttgcaaatatctgaggaagccaattttgaaaaaaccaaggctttaatccagtgtgaccagttgaggaaggagctggagaggcaggcggagcgacttgaaaaagaacttgcatctcagcaagagaaaagggccattgagaaagacatgatgaaaaaggaaataacgaaagaaagggagtacatgggatcaaagatgttgatcttgtctcagaatattgcccaactggaggcccaggtggaaaaggttacaaaggaaaagatttcagctattaatcaactggaggaaattcaaagccagctggcttctcgggaaatggatgtcacaaaggtgtgtggagaaatgcgctatcagctgaataaaaccaacatggagaaggatgaggcagaaaaggagcacagagagttcagagcaaaaactaacagggatcttgaaattaaagatcaggaaatagagaaattgagaatagaactggatgaaagcaaacaacacttggaacaggagcagcagaaggcagccctggccagagaggagtgcctgagactaacagaactgctgggcgaatctgagcaccaactgcacctcaccagacaggaaaaagatagcattcagcagagctttagcaaggaagcaaaggcccaagcccttcaggcccagcaaagagagcaggagctgacacagaagatacagcaaatggaggcccagcatgacaaaactgaaaatgaacagtatttgttgctgacctcccagaatacatttttgacaaagttaaaggaagaatgctgtacattagccaagaaactggaacaaatctctcaaaaaaccagatctgaaatagctcaactcagtcaagaaaaaaggtatacatatgataaattgggaaagttacagagaagaaatgaagaattggaggaacagtgtgtccagcatgggagagtacatgagacgatgaagcaaaggctaaggcagctggataagcacagccaggccacagcccagcagctggtgcagctcctcagcaagcagaaccagcttctcctggagaggcagagcctgtcggaagaggtggaccggctgcggacccagttacccagcatgccacaatctgattgctga

SEQ ID NO: 408 - DNA, 945 bp, Homo sapiens
  source 1..945: mol_type = genomic DNA
atggatggaaccaatggcagcacccaaacccatttcatcctactgggattctctgaccgaccccatctggagaggatcctctttgtggtcatcctgatcgcgtacctcctgaccctcgtaggcaacaccaccatcatcctggtgtcccggctggacccccacctccacacccccatgtacttcttcctcgcccacctttccttcctggacctcagtttcaccaccagctccatcccccagctgctctacaaccttaatggatgtgacaagaccatcagctacatgggctgtgccatccagctcttcctgttcctgggtctgggtggtgtggagtgcctgcttctggctgtcatggcctatgaccggtgtgtggctatctgcaagcccctgcactacatggtgatcatgaaccccaggctctgccggggcttggtgtcagtgacctggggctgtggggtggccaactccttggccatgtctcctgtgaccctgcgcttaccccgctgtgggcaccacgaggtggaccacttcctgcgtgagatgcccgccctgatccggatggcctgcgtcagcactgtggccatcgaaggcaccgtctttgtcctggcggtgggtgttgtgctgtcccccttggtgtttatcctgctctcttacagctacattgtgagggctgtgttacaaattcggtcagcatcaggaaggcagaaggccttcggcacctgcggctcccatctcactgtggtctcccttttctatggaaacatcatctacatgtacatgcagccaggagccagttcttcccaggaccagggcatgttcctcatgctcttctacaacattgtcacccccctcctcaatcctctcatctacaccctcagaaacagagaggtgaagggggcactgggaaggttgcttctggggaagagagagctaggaaaggagtaa

SEQ ID NO: 409 - DNA, 7116 bp, Homo sapiens
  source 1..7116: mol_type = genomic DNA
atggcggcccccgagtcagggccggctttgagtccaggcactgcagagggtgaggaggagacgattctctatgacttgttggtcaacaccgagtggccaccggagactgaagtacagcctagaggcaaccaaaaacatggtgcatcctttatcatcacgaaagcaattcgagatcgtttattatttttacgccaatacatctggtacagcccggcaccttttttgctccctgatggactggttcgcttggttaataaacagataaactggcatttggtacttgcaagcaatggaaagcttttggctgctgttcaagatcagtgtgtggaaatcaggtctgcaaaagatgattttacatccattattgggaaatgtcaagttccgaaagacccgaaaccccagtggagacgggtagcatggagttacgattgtaccctactggcctatgccgaaagcacaggaactgtgagggtgtttgatctcatgggaagtgaactctttgtcatttccccggcatctagttttataggtgacttaagctatgccattgctgggttgatatttttagaatataaagcaagtgcacagtggtctgcagaactcctggtcatcaattaccgaggagaacttagaagttaccttgtaagtgttggaacaaatcagagctaccaagaaagtcactgtttcagcttcagtagtcattatcctcatggaatcaacacagctatttaccaccctggtcacagacttttacttgttggtggatgtgaaactgctgaagtaggcatgtcaaaagcttctagctgtggcctttctgcctggagagttctttcaggatcaccgtattataagcaggttactaatggtggagacggggttactgcagtaccgaagacactgggattattaaggatgttaagtgtcaagttttacagtcgccagggacaagaacaggatggaatttttaagatgagcctttctccagatgggatgctcctggcagccattcacttctcagggaaactgagcatctgggcgattccatctctgaagcaacaaggggaatggggtcaaaatgagcagccaggctatgatgaccttaatcctgattggaggctctctactgagaagagaaaaaaaatcaaagataaagagtccttttacccactgatagatgtcaattggtgggcagacagtgcagtgactttagctcgatgctctggtgctttaactgtttcatctgtgaaaactttgaagaatttactgggaaaatcctgtgaatggtttgaaccatcacctcaagtcactgctacccatgatgggggatttttaagtttggagtgtgagattaaacttgcccccaaacgatctcgtttggagactagagctggagaagaagatgaaggagaagaggattctgattctgattatgaaatatctgccaaggctcgctactttggttatataaaacagggcctttacttggtgactgaaatggagcgatttgcaccaccacggaaacgcccacgaaccattactaaaaactaccgccttgtgagtttgcgctccacgacaccagaggaactttatcagaggaagattgaaagtgaagagtatgaggaagccttgtccttggctcatacctacggcctggatactgaccttgtatatcagaggcagtggaggaagtcagcggtcaacgttgcttcaattcagaattatttgagtaaaataaagaagcgatcctgggttctccatgagtgtttggaaagagttcctgaaaatgtggatgctgcaaaagaactgcttcagtatggattaaaaggcacagacctggaggctcttttagcaatagggaaaggagcagatgatggcagatttacattacctggtgaaatagacattgacagtatctcctatgaagagctttcaccacctgatgaagagcctgccaagaataaaaaggaaaaggagctcaagaagagacaagaactactgaaattagtgaacttttccaagttgacactggaacaaaaggaactttgccgttgtagacggaagttattaacctacttagatcgacttgcaacatatgaggaaatcctaggagtgcctcatgcatctgaacagagatatgatgctgaattctttaagaaattcagaaatcagaatattgttctctcagcaagaacttatgctcaggaaagtaatgtacaagccctggaaattctgtttacttaccatggttccgacctgcttcctcatcgccttgcaattctgtccaactttccagagaccacttctccacatgaatattctgttttgctgcccgaagcttgttttaacggtgactccctgatgatcattccttggcatgaacataaacaccgagctaaagattggtgcgaggagttggcttgcagaatggttgttgagccgaatctccaagatgaaagtgaattcttgtatgctgcacagcctgagttactaaggttcaggatgacccagcttacggtggagaaggttatggactggtatcagaccagagcagaggaaatagagcattatgctcggcaggtggactgtgcattgtcacttattcgacttgggatggagcggaatattcctggtttgctggttctctgtgacaatttggttactctggaaacattggtttatgaagccaggtgtgatgtaactctaaccctgaaagaactccagcagatgaaagacattgaaaaactaagattactgatgaatagttgttctgaggataaatatgtgacaagtgcctaccagtggatggttccctttcttcatcgttgtgagaaacagtcgcctggtgtggctaatgagctattaaaagaatatttagtaactttagctaaaggggacttaaaatttcccctgaagatatttcagcattccaaaccagatctgcagcaaaaaattattcctgatcaggaccaactgatggcaatagcactagagtgcatctatacctgtgaacgaaatgatcaactctgtctttgctatgacctactagaatgtctgccagaaagaggatatggtgataagacagaggcaaccacaaagcttcatgacatggtagaccaactggaacaaattctcagtgtgtcagagcttttggaaaaacatggactcgagaaaccaatttcatttgttaaaaacactcaatctagctcagaagaggcacgcaagctgatggttagattgacgaggcacactggccggaagcagcctcctgtcagtgagtctcattggagaacgttgctgcaagacatgttaactatgcagcagaatgtatacacatgtctagattctgatgcctgctatgagatatttacagaaagccttctgtgctctagtcgccttgaaaacatccacctggctggacagatgatgcactgcagtgcttgttcagaaaatcctccagctggtatagcccataaagggaaaccccactacagggtcagctacgaaaagagtattgacttggttttggctgccagcagagagtacttcaattcttctaccaacctcactgatagctgcatggatctagccaggtgctgcttacaactgataacagacagaccccctgccattcaagaggagctagatcttatccaagccgttggatgtcttgaagaatttggggtaaagatcctgcctttgcaagtgcgattgtgccctgatcggatcagtctcatcaaggagtgtatttcccagtcccccacatgctataaacaatccaccaagcttctgggccttgctgagctgctgagggttgcaggtgagaacccagaagaaaggcggggacaggttctaatccttttagtggagcaggcacttcgcttccatgactacaaagcagccagtatgcattgtcaggagctgatggccacaggttatcctaaaagttgggatgtttgtagccagttaggacaatcagaaggttaccaggacttggccactcgtcaagagctcatggcttttgctttgacacattgccctcctagcagcattgaacttcttttggcagctagcagctctctgcagacagaaattctttatcaaagagtgaatttccagatccatcatgaaggaggggaaaatatcagtgcttcaccattaactagtaaagcagtacaagaggatgaagtaggtgttccaggtagcaattcagctgacctattgcgctggaccactgctaccaccatgaaagtcctttccaacaccacaaccaccaccaaagcggtgctgcaggccgtcagtgatgggcagtggtggaagaagtctttaacttaccttcgaccccttcaggggcaaaaatgtggtggtgcatatcaaatcggaactacagccaatgaagatctagagaaacaagggtgtcatcctttttatgaatctgtcatctcaaatccttttgtcgctgagtctgaagggacctatgacacctatcagcatgttccagtggaaagctttgcagaagtattgctgagaactggaaaattggcagaggctaaaaataaaggagaagtatttccaacaactgaagttctcttgcaactagcaagtgaagccttgccaaatgacatgaccttggctcttgcttaccttcttgccttaccacaagtgttagatgctaaccggtgctttgaaaagcagtccccctctgcattatctctccagctggcagcgtattactatagcctccagatctatgcccgattggccccatgtttcagggacaagtgccatcctctttacagggctgatcccaaagaactaatcaagatggtcaccaggcatgtgactcgacatgagcacgaagcctggcctgaagaccttatttcactgaccaagcagttacactgctacaatgaacgtctcctggatttcactcaggcgcagatccttcagggccttcggaagggtgtggacgtgcagcggtttactgcagatgaccagtataaaagggaaactatccttggtctggcagaaactctagaggaaagcgtctacagcattgctatttctctggcacaacgttacagtgtctcccgctgggaagtttttatgacccatttggagttcctcttcacggacagtggtttgtccacactagaaattgaaaatagagcccaagaccttcatctctttgagactttgaagactgatccagaagcctttcaccagcacatggtcaagtatatttaccctactattggtggctttgatcacgaaaggctgcagtattatttcactcttctggaaaactgtggctgtgcagatttggggaactgtgccattaaaccagaaacccacattcgactgctgaagaagtttaaggttgttgcatcaggtcttaattacaaaaagctgacagatgaaaacatgagtcctcttgaagcattggagccagttctttcaagtcaaaatatcttgtctatttccaaacttgttcccaaaatccctgaaaaggatggacagatgctttccccaagctctctgtacaccatctggttacagaagttgttctggactggagaccctcatctcattaaacaagtcccaggctcttcaccggagtggcttcatgcctatgatgtctgcatgaagtactttgatcgtctccacccaggtgacctcatcactgtggtagatgcagttacattttctccaaaagctgtgaccaagctgtctgtggaagcccgtaaagagatgactagaaaggctattaagacagtcaaacattttattgagaagccaaggaaaagaaactcagaagacgaagctcaagaagctaaggattctaaagttacctatgcagatactttgaatcatctggagaaatcacttgcccacctggaaaccctgagccacagcttcatcctttctctgaagaatagtgagcaggaaacactgcaaaaatacagtcacctctatgatctgtcccgatcagaaaaagagaaacttcatgatgaagctgtggctatttgtttagatggtcagcctctagcaatgattcagcagctgctagaggtggcagttggccctcttgacatctcacccaaggatatagtgcagagtgcaatcatgaaaataatttctgcattgagtggtggcagtgctgaccttggtgggccaagggacccactgaaggtcctggaaggtgttgttgcagcagtccacgccagtgtggacaagggtgaggagctggtttcacctgaggacctgctggagtggctgcggcctttctgtgctgatgacgcctggccggtgcggccccgcattcacgtgctgcagattttggggcaatcatttcacctgactgaggaggacagcaagctcctcgtgttctttagaactgaagccattctcaaagcctcctggccccagagacaggtagacatagctgacattgagaatgaagagaaccgctactgtctattcatggaactcctggaatctagtcaccacgaggctgaatttcagcacttggttttacttttgcaagcttggccacctatgaaaagtgaatatgtcataaccaataatccatgggtgagactagctacagtgatgctaaccagatgtacgatggagaacaaggaaggattggggaatgaagttttgaaaatgtgtcgctctttgtataacaccaagcagatgctgcctgcagagggtgtgaaggagctgtgtctgctgctgcttaaccagtccctcctgcttccatctctgaaacttctcctcgagagccgagatgagcatctgcacgagatggcactggagcaaatcacggcagtcactacggtgaatgattccaattgtgaccaagaacttctttccctgctcctggatgccaagctgctggtgaagtgtgtctccactcccttctatccacgtattgttgaccacctcttggctagcctccagcaagggcgctgggatgcagaggagctgggcagacacctgcgggaggccggccatgaagccgaagccgggtctctccttctggccgtgagggggactcaccaggccttcagaaccttcagtacagccctccgcgcagcacagcactgggtgtga

SEQ ID NO: 410 - DNA, 2661 bp, Homo sapiens
  source 1..2661: mol_type = genomic DNA
atggagctgcgctgtgggggattgctgttcagttctcgctttgattcagggaatctagcccacgtggagaaggtggaatctttgtccagtgatggggaaggggtaggaggtggggcgtcagccctgaccagtggcattgcctcttcccctgactatgaattcaacgtgtggacccgaccagactgtgctgaaacggaatttgagaatgggaacaggtcatggttctacttcagcgtccggggaggaatgccaggaaaactcatcaagatcaacattatgaacatgaacaagcagagcaagctgtattcccagggcatggccccctttgtgcgcacactgcccacccggccacgctgggaacgcattcgagaccggcccacctttgagatgacagagacgcagtttgtgttatcctttgttcatcgtttcgtggagggccgtggggccaccaccttcttcgccttctgctaccccttctcctacagtgactgccaggaactgctaaaccagctagaccagcgctttccggagaaccaccctacccatagcagccccctggataccatctattaccatcgggagctcctttgctattctctggatggacttcgtgtagatctgctgacgatcacttcctgccatgggcttcgagaagatcgagagccccgtctagagcagctatttcctgataccagcacccctcgaccattccgtttcgcaggcaagaggatattcttcttaagcagtagagtacacccaggggagactccatctagctttgtcttcaatggctttctggacttcatcctccgacctgatgatccccgggcccaaaccctccgtcgcctcttcgtctttaagctgattcccatgttgaaccccgatggtgtggtccggggacactaccgcacagactcacgtggagtgaatctgaaccgtcagtacctgaagcctgatgccgtcctgcacccggccatctatggggccaaagctgtgcttctctaccaccatgtgcactctcgtctgaactcccagagttcctctgagcaccagcccagttcctgtctccctcctgatgctcctgtttctgacctggagaaagccaacaatctccaaaatgaagctcagtgtgggcactcagctgacaggcataacgctgaagcctggaaacaaacagagccagcagaacagaagctcaacagtgtgtggattatgccacaacagtctgcggggcttgaagagtcagcccctgataccatcccccccaaagagagtggcgttgcttactatgtggacctgcatggacatgcttccaaaaggggctgcttcatgtacggaaacagctttagtgatgagagcacccaggtggaaaacatgctatatccaaagctcatctccttgaattcagcccacttcgacttccagggctgcaatttctcagagaagaatatgtatgcccgagaccgtagagatggccagtctaaagagggaagcggccgtgttgcaatctacaaagcctcagggataatccacagctacacacttgaatgcaactacaacactggacgctcagtaaacagcatccctgctgcctgccatgacaatgggcgtgccagcccccctcccccgccggctttcccctccagatacactgtggaactatttgagcaggtgggacgagctatggccattgcagccctggacatggcggaatgtaatccgtggccccgaattgtactgtcagagcacagcagccttactaatctacgggcctggatgctgaaacatgtacgcaacagccgaggcctaagcagcactctgaatgtgggtgtcaacaagaagaggggccttcgaactccacccaaaagtcacaatgggttgcctgtctcctgctccgaaaacaccttgagtcgggcacgaagttttagcaccggcacaagtgccggtggtagcagcagcagccaacaaaattctccacagatgaagaattcccccagctttccttttcatggcagtcggcctgcagggctgccaggcctgggctctagtacccaaaaggtcacccaccgggtgctgggccccgtcagagagccccgaagccaggacaggagacggcagcagcagcccctgaaccatcgtcctgcaggcagcctcgctccatccccagctcctactagttctggcccagcctcctcacacaagctgggctcctgtctactgcctgattcattcaacataccagggagcagttgctcactcttgtcctctggagacaaaccagaggctgtcatggtaatcgggaaaggtctgctagggactggagctcggatgccctgcatcaagactcgattgcaggctaggcccaggttgggccggggctcaccgccgactcgcagagggatgaaaggctcttcaggccccacatcccctaccccccggaccagggagagcagtgagctggagctgggatcctgctctgctacaccagggctgcctcaggccaggcccccacggccccgctctgcccctgccttttctcctatatcctgtagtctatctgactccccatcctggaattgttacagcaggggtcccttgggccaacctgaggtttgttttgtccctaaatctcccccactgactgtttctccccgggtctga

SEQ ID NO: 411 - DNA, 1626 bp, Homo sapiens
  source 1..1626: mol_type = genomic DNA
atgccccgaaggaagcaaagccacccgcagcccgtgaaatgcgagggggtcaaagtggatactgaagactccctcgacgaaggacccggggccctggtattggagagtgatttgctactaggccaggatctggagtttgaggaggaagaggaagaggaggaaggcgacggcaacagtgaccagctcatgggcttcgagagagactcggaaggagactctctgggggccaggcctgggcttccctatgggctgagcgacgatgagtctgggggcggccgggcactaagtgcggagagtgaagttgaggagccagccaggggtccaggggaggccaggggtgagaggccaggcccagcctgccagctgtgtggggggccgacaggtgaggggccgtgttgtggggcaggagggccgggtggggggcccctgctgcccccacggctactgtactcatgccgcctctgcaccttcgtgtcccactactcgagccacctgaagcggcacatgcagacacacagcggagagaagccgttccgctgtggccgctgcccctacgcctcagcccagctcgtcaacctgacacgacatacccgcacccacactggcgagaagccctaccgctgtccccactgcccctttgcctgcagcagcctgggcaacctgaggcggcatcagcgtacccacgcagggccccccactcctccctgcccgacctgtggcttccgctgctgtactccacgaccagcccggcctcccagtcccacagagcaggagggggcggtgccccggcgacctgaagatgctctgctccttccagatttgagcctccatgtgccaccaggtggtgccagtttcctgccagactgtgggcagctgcggggtgaaggggagggcctctgcgggactggatcagaaccactgccagagctgctattcccttggacctgccggggctgtggacaagagctggaggagggtgagggtagtcggctgggagctgccatgtgtgggcgctgcatgcgaggagaggctggagggggtgccagtggggggccccagggccccagtgacaaaggctttgcctgtagcctctgcccctttgccactcactatcccaaccacctggcccggcacatgaagacacacagtggtgagaagcccttccgctgcgcccgctgtccttatgcctctgctcatctggataacctgaaacggcaccagcgcgtccatacaggagagaagccctacaagtgccccctctgcccttatgcctgtggcaatctggccaacctcaagcgtcatggtcgcatccactctggtgacaaaccttttcggtgtagcctttgcaactacagctgcaaccagagcatgaacctcaaacgtcacatgctgcggcacacaggcgagaagcccttccgctgtgccacctgcgcctataccacgggccactgggacaactacaagcgccaccagaaggtgcatggccacggtggggcaggagggcctggtctctctgcctctgagggctgggccccacctcatagcccaccctctgttttgagctctcggggcccaccagccctggggactgctggcagccgggctgtccacacagactcatcctga

SEQ ID NO: 412 - DNA, 5250 bp, Homo sapiens
  source 1..5250: mol_type = genomic DNA
atgcacttgaagcacctgaggaccctgctgagccctcaggatggagctgcaaaggtgacctgcatggcttggtcccagaacaatgccaaatttgctgtctgcacagtggaccgagtggtcttgctgtatgatgaacatggagaacggagagataaattctccaccaaaccagctgacatgaagtatggcaggaagagctatatggtgaagggcatggctttttctcctgattccactaaaattgccataggacagactgacaacatcatctatgtctacaagattggagaagattggggtgacaagaaagtcatctgcaacaagttcatccagacgagtgctgtcacttgtctgcaatggccggcagaatacatcattgtctttggactggctgaagggaaggttcgtttagcaaacaccaaaactaataaatcatctaccatctatgggacagagtcttacgtggtgtccctgacaacaaattgctctgggaaaggaattctctctggtcatgcagatggtaccatcgttaggtatttctttgatgatgaaggctctggagagtcacaggggaagttggttaaccacccgtgtccaccctatgccttggcatgggcaaccaatagcatcgtggctgcaggctgtgatcggaaaattgtagcctatggaaaagaaggtcacatgctacaaacttttgattatagccgtgaccctcaggagcgggagttcaccacagctgtatcaagtcctgggggccagtctgttgtgctaggaagttatgacaggcttcgggtgttcaactggatccctcgaagaagcatctgggaagaggcaaagcccaaggagattaccaatttatacaccatcactgccttggcctggaagcgggatggctcacggctctgtgtgggcacactatgtggtggggtggaacagtttgactgctgcctccgaaggagtatttacaagaacaagtttgagttgacgtatgtgggacctagccaggtgattgtgaagaacctgtcatcaggaacccgagtggtgctcaagtcacactatggctatgaggtggaagaggtgaaaatcctaggaaaggaacgttacttggtggctcacacatcagaaacactgctgctgggggacctgaacactaatcggcttagtgagatagcctggcaaggatctggtggcaatgagaagtatttctttgaaaatgagaatgtatgcatgatcttcaatgccggagagctaaccctggtggaatatgggaataatgacaccctgggttctgtacgcactgaattcatgaacccccacctcatcagtgttcgtattaatgagaggtgtcagcgaggaacagaagataataagaaattggcttatcttattgatattaagactattgctatagtggatctgattggtggctacaacattggcaccgtcagccatgagagccgtgtggattggctggaacttaatgagactggacacaagctcctcttcagggaccggaaacttcgtttgcatctgtatgatattgaaagctgctctaagacaatgatcctcaacttctgctcctatatgcagtgggtcccaggaagtgacgtgctggtagctcagaaccgaaacagtctgtgtgtatggtacaacattgaggcacctgagagagtcaccatgttcactattaggggtgatgttataggtctggagcggggcgggggaaagaccgaggtgatggtgatggaaggtgtgactactgttgcctacacattggatgagggcctcatcgagtttggaacagccattgatgatggcaactacatccgggcaacagccttcttagagactctggaaatgaccccagaaacagaggcaatgtggaaaaccttgagtaaactggcactagaggcaaggcaactacacattgcggagaggtgcttttctgctttgggccaagtagcaaaagctcgattcctgcatgagaccaatgagattgcagatcaagtatcccgggaatatggcggagaaggaacagacttttatcaggtccgagcacgtctagccatgctggaaaagaactacaaactggctgaaatgatctttttggaacagaatgctgtggaggaggccatgggcatgtaccaggagctacaccgttgggatgagtgtatcgctgtggctgaagccaaggggcacccagccctggagaagctacgtcgtagttactaccagtggctgatggacacacagcaagaggagcgagcaggtgaactacaggagagccaaggggatgggctagcagccatcagcctctacctcaaagctgggctccctgccaaagctgctcggctggtgctgacccgagaggaactgctagccaacacagagctggtagaacacatcactgcagcccttatcaagggggaactctacgaaagggcaggtgatctctttgagaagattcacaatccacagaaggccctggagtgctaccgtaaaggcaacgcattcatgaaagcggtagagctggctcgattggccttcccagtggaggtggtgaaactagaggaggcatggggggaccacctggtgcagcagaagcagcttgatgcagccattaatcactacatcgaagccaggtgctccattaaggcaattgaggccgccctgggtgcccgccagtggaagaaggcaatttatatattagatctacaggaccggaacactgcatccaaatactatcctctcgtggcccaacactatgcatccctgcaggagtatgagattgctgaggagctctatactaagggagatcggacaaaagatgccatagacatgtacacccaggctggtcgttgggaacaagcccacaagctggcgatgaaatgcatgagaccagaagatgtgtcagtgctatacatcactcaggcccaggaaatggagaagcagggcaagtaccgtgaggctgaaaggctatatgtgacagtacaagagcctgatcttgccatcaccatgtacaaaaagcacaagttgtatgatgacatgatccgcctggtagggaagcaccatccagatctcctcagtgatacacacctacatctgggcaaggagctggaggctgaaggccgactacaggaggctgagtaccactacctcgaggcccaggaatggaaggcaacagtgaacatgtaccgggccagtgggctttgggaagaggcctacagggtggccagaactcaaggaggggctaatgcccacaaacacgtggcctatctgtgggcaaagagcctgggaggagaggctgcagttagactgcttaataagctgggactcctggaagctgctgttgaccacgctgcagacaattgctcctttgaatttgcgtttgaactctctcggctggccctcaagcacaaaacccccgaggttcatctcaaatatgctatgttcctggaggatgagggtaaattcgaagaggctgaagctgaattcatcagagctggtaaacccaaggaggcagtcctcatgtttgtccataaccaggattgggaggcagctcagcgtgtggctgaggctcacgaccctgacagtgtcgccgaggtgcttgtgggacaggcccggggggccttggaggagaaggactttcagaaagcagaagggctgctgctccgggcccagagaccaggcctggccctcaattattataaggaggctggattatggagtgacgctctgcgcatctgcaaggactatgtgcccagccagctggaggctctgcaggaagaatatgagcgggaagctactaagaagggggccaggggtgtggagggatttgtggaacaagctcgacactgggagcaggctggagagtacagccgtgccgtggactgctacctcaaagtgcgagactctggaaacagcggcctggcggagaagtgctggatgaaggcagctgaactctccatcaagtttctgcctccccaacgtaatatggaagtcgttctggctgtaggaccccagctgattggaattggaaagcacagtgcagctgcagagctctatctgaatctggaccttgtcaaggaagcaatcgatgctttcatcgagggtgaggagtggaacaaggcgaagcgtgtagctaaggagttagatcccaggtatgaagactatgtggaccagcattataaagagttcctcaagaatcagggcaaagtggactcgctggtgggtgtggatgtgatagctgctttggacctgtatgtggagcagggccagtgggacaagtgcattgaaacagctaccaagcagaactacaagattctgcacaagtatgtggctttgtatgcaactcacttgatccgggagggtagctctgcccaggcattggccctgtatgtacagcacggagcccctgctaacccacagaacttcaatatctacaaaaggatcttcactgacatggtgagctctcctggaaccaactgtgccgaggcctatcatagctgggctgatcttcgagatgtcctcttcaacctgtgtgaaaacctggtgaagtccagtgaggcaaactctccagcccatgaggagttcaagacgatgctgctgatcgctcattactatgccacgcgctctgcagcccagagtgtcaaacagctggaaaccgtggctgccaggctttctgtttcactcttgcgtcacacccagctactacctgtagacaaagccttctatgaagcaggcattgctgccaaggcagttggctgggataacatggcattcatcttcctcaatcgctttttggacctgaccgatgcaatcgaggaagggactctagatggccttgaccactctgattttcaggatacagacattccctttgaggtgccactcccagctaagcagcatgtaccggaggctgagagagaagaggttcgagactgggtgcttacagtctccatggaccagcggctggagcaggttctgcctcgggatgagcgtggcgcctacgaggcctccctagtggcagcgagcactggtgttcgagccctgccctgccttattacaggataccccattctgaggaacaaaattgaatttaagcggccagggaaggctgctaacaaggacaactggaataaattccttatggccatcaagacctcccacagcccagtgtgccaggacgtgctgaaattcatcagtcagtggtgtggagggctccccagcaccagcttttcctttcagtag

SEQ ID NO: 413 - DNA, 3867 bp, Homo sapiens
  source 1..3867: mol_type = genomic DNA
atggggtgtacaccttcacacagtgaccttgtaaacagcgttgcaaagagtggcattcagttcttgaaaaagcccaaagcaattcggccaggatgtcagggcggaagtgaaagaggttccatccctttgctggttaaaaactccacctgctatgacgctggggagggcctggcagaggagcagccaagtcccaggaggaaccaaaccacagctaaaggtctttgtcagctcatgggagatcctgcttcaggcaaaaggaaagatatggaaggactgatcccaggaaccaaaacctcttcatcccagctgaacaaatcacaaagccacatggctaaggatattccgttcaagacacagggttcccatggatcacaaggggcagacttttctggagatgagagtgaggaaagtagtacccaagatacttccaaatggaaaaggacagcaaaatgtcacacgtcaagcacacagagccactgctaccaaaccatccaccctgctcatgagcctgaaggcaaagtggacttcccggagcctctggtaaaggcccaccagcaggcttacacctatctacactccagcctctccaaatatgaagcaattctgtgcatcatccatcaggccacccagacccgggagctgctgcagcccatggtcagcttcttgctgctgtgctttgaggagatcagccagctgttgggggagatctccaaggatggagaagtgctcctgcaggaagtcagggaggatctggcttggcctttgaagaaaagagagccccaggagcagccaaatctcctgcaacagctgctacagtacacagtcagcaagctgcaggtgctcaatggcacagtggcctcgctcaccggcagcttcctggagggctccagcagctacctccactccactgcaacccacttggaaaataagctgagcacaaaaaggaatgtggatgaacgcctcctgagggctctgaggcagctagagagcctggcgagtggctgtggcgaccctggggtgcagggtctccccttatgctctgaggacagtggcattggtgctgacaatgagtccgtgcagtcggtggacaagctgggcaagcaaaccagctgggaccttgcaccagagcccgaagaatggaagtcggtgacttcaccccacacagaggccaggcagtcaggacacacctggcagcaaagtccattctgtttgggctcaggcagaccccaggactgcctgctctcaggggctcctatggcaaaggttcagccacgagcacaggacgaagcaaggagcccatgcctctccagtacaagcccagaaaatatcacctccccacctttgaagctggggacaagcaccccatgtgattcctttgggattggggtctctgtggaaccacacctttccaaaacctccaggccgatggacgcttcatctcttagtgacagcgaggacagcagcccagaggaggaggaggaagacaaaatgagcagcatgagtctgtgtgcctggcaggaaaaaactccacattcaaggccacaatcttcacctgctgaccgggaaagcccatttcaggcccgcaccaggaggcttaggagcctccaggcccaggaaatgattctgaagatgaaggagtcaatcagcgaaaggatcaagtttgtccctgtgccctgtgggcaccaggactggtctgaggaggaggaggggaggacagtggtccccccaagacctagcacggtaagtggcagcaggagggcccctgagaggcagacgaggtcccagtcagagtcgtgtctccagagtcacgtggaggaccccacctttcaggagctgcgaagggtccagagggacctcagtcagaagctggaggcattttatgccctgggtgccaaagggcaggggcagagccaggagcaaattctgcagcccagagcagccgccgtgtggcccaatggcacctgcagggtcagtccaagcaacaccaccagcaggctcaaggcatccctcaccaagaacttcagtattttgcctagtcaggacaagagcatcttgcagaaatgcaatccccatcctgaggacgaacaaggcaaagctgggaagcttccaaatgccatcccatcaggagaggtcagtgaggctgccaaggccacagactggaatgtcagaggctgtcccaccagaacatccgtcaagaagcttattgaaactttcagtcccacggagagtctgaggatgctgggggactctaaggacgctggggcaagtccctgcctcaggaattgcatcatgccccccagatttcccaagtacacagggcttgcccctttgtatccgaagccccaaatttctccagcatcaggcagagaatctctcaaaatgggcataggctggaagcccttagcacctatctttccccctctgcctaaagcagaagcagccaagagtgaggagctcagctgtgaaatggaggggaacctcgagcacctccctccaccgcctatggaagttctgatggacaaatcattcgcttctctggagtccccagaaagcagcaagtccacagagaactcccccaaggaaacccaggagccagggccgggagaggctggccccaccaggagaacatgggcttccccaaagctgagggcctctgtgagccccctggacttgctgcccagcaagagcaccgccagcctgaccaagcctcacagcacagggccagggagtggcaggagcagctgccagcccaggaagccagccctggacctgagcagcccaccagccaccagccaaagccccgaggtgaagggtgggacttggagtcaggcagagaaggccaccagcctctacaggcagccccggaaggccatcgcctggcaccactccggccctccatctggacaaaacaggacctcagagtccagcctggccagaccaaggcagagccgagagagaagcccccctgtgggcagaaaggcctctcccacgaggacacactgggtgcctcaagcagacaagaggcgccggagccttccctcctcttacagacctgcccagccaagcccctctgctgtgcagacgccccccagcccacctgtgagccccagggtgctaagcccacccaccacaaagcggcgaacttccccaccgcaccagcccaagttgcccaaccctccccccgagagtgcacctgctcagtgcaaggtccccagccccccaacccagcacccagaagcaagcccccctttctcgattccctccccatcacccccaatgtccccttctcaggagcacaaggaaacaagagactctgaagacagccaagcagtcatagccaaagtgtctgggaacacacattccatattctgcccagctacctcctctctgtttgaagctaaaccgccactctcaacagcccacccactgaccccaccatcgctgccgccagaggctgggggccctctcgggaacccagcagaatgctggaagaacagctcagggccttggctgagagcagactcgcagcggagagcagctctgtgtgccctcaaccctctgcctttcctcaggaggacagcttctgaccgccagccaggtggccgaccgcagcctcccaccttggaccccaccagcacctcttatgaatcccagctcggccagaacagcagcagcgaggagagccctaagaaggacacagagccggggagcagcccctgttcccctgaactgcagggcggcaccaggcgtgcatctcccccagagttctgtgtgctgggccacgggctgcaaccggagcctcggaccggccacatccaggacaaatcccagccagaggcgcagccccagcaagaggaggtgtcctga

SEQ ID NO: 414 - DNA, 594 bp, Homo sapiens
  source 1..594: mol_type = genomic DNA
atgatgtttccacaaagcaggcattcgggctcctcgcacctaccccagcaactcaaattcaccacctcggactcctgcgaccgcatcaaagacgaatttcagctactgcaagctcagtaccacagcctcaagctcgaatgtgacaagttggccagtgagaagtcagagatgcagcgtcactatgtgatgtactacgagatgtcctacggcttgaacatcgagatgcacaaacaggctgagatcgtcaaaaggctgaacgggatttgtgcccaggtcctgccctacctctcccaagagcaccagcagcaggtcttgggagccattgagagggccaagcaggtcaccgctcccgagctgaactctatcatccgacagcagctccaagcccaccagctgtcccagctgcaggccctggccctgcccttgaccccactacccgtggggctgcagccgccttcgctgccggcggtcagcgcaggcaccggcctcctctcgctgtccgcgctgggttcccaggcccacctctccaaggaagacaagaacgggcacgatggtgacacccaccaggaggatgatggcgagaagtcggattag

SEQ ID NO: 415 - DNA, 1983 bp, Homo sapiens
  source 1..1983: mol_type = genomic DNA
atggccacctcccaccgagtggcgaagctggtggcctccagtctccagaccccggtaaatcccatcactggagcgcgggtcgcccagtacgaacgcgaagaccccttaaaggccctggcggcagcggaggcgatcttggaggacgaagaggaggagaaagtggctcagcccgctggggcatcggctgatttgaacaccagcttttctggggtggatgaacatgcaccgataagctatgaggactttgtgaactttcctgatattcaccactctaatgaggagtatttcaagaaagtagaagagttgaaggctgcccacatagaaactatggcaaaattagagaaaatgtaccaggataaattacatttaaaggaagttcagccagtggtcatcagagaagactctcttagtgactcttccagatctgtatcagaaaagaactcctatcaccctgtctcattaatgacatcattttcagagcctgatttaggccagtcttcctccttgtatgtgtcctcctctgaagaggagttacccaacctagaaaaagagtatcctaggaaaaacagaatgatgacctatgctaaggagctcatcaacaatatgtggacagacttttgtgttgaggattatattcgctgtaaagatactggcttccatgcagctgaaaaaagaaggaagaaacgaaaagaatgggtgcccacaattacagtaccggagccttttcaaatgatgataagagaacagaagaaaaaagaagagtccatgaaatctaaatcagatatcgaaatggtacataaagcgctcaaaaaacaagaagaggatccagagtataagaagaaattccgagccaatccagttcctgcatctgtctttctccccctttaccatgatttagtcaagcaaaaagaagaacggagaaggtctctgaaggagaaaagcaaagaagctcttttggcctcacaaaagccatttaaatttatagcaagggaggaacagaagcgagcagcccgggaaaagcagctgagagactttcttaagtataaaaagaaaacaaatcgatttaaagccagacccattcctcgatctacttatggttcaactaccaatgacaagttaaaagaagaagagctctatcgaaaccttaggacacagctgagagcccaggagcatttacagaactcatctcctctgccttgtaggtcagcttgtggatgcaggaaccccaggtgtcctgaacaggctgtaaagttgaagtgtaaacacaaggttaggtgcccaactcctgattttgaggaccttcctgagagataccagaaacacctctcagaacacaagtctccaaaactcttaacagtgtgtaaaccatttgatcttcatgcatctccacatgcatctattaaaagagaaaaaattttggcagacatcgaagcagatgaagaaaatttaaaagaaacacgttggccttatttgtctccaaggcgtaagtcaccagtaagatgtgcaggtgtaaaccctgtgccttgtaactgcaaccctcccgtgcccacggtatcttccagaggacgagaacaagccgtaagaaagagcgaaaaggaaaggatgagagaataccaacgagaactagaagaaagagaagaaaaattaaaaaagaggccactgctatttgaaagagttgctcagaaaaatgcaagaatggcagcagaaaagcattattctaataccctaaaagcactaggaatatctgatgagtttgtttcaaagaaaggccaaagtggaaaagtacttgagtacttcaacaatcaagagacgaaaagtgtcactgaagacaaagaaagctttaatgaagaagaaaaaatagaagaaagagagaatggggaagaaaattattttattgataccaacagccaggattcttacaaggaaaaagatgaagccaatgaggaaagtgaagaagagaaatctgttgaagaatcacactga

SEQ ID NO: 416 - DNA, 2241 bp, Homo sapiens
  source 1..2241: mol_type = genomic DNA
atgaggcgagagttttgctgggacgcctactccaaagcggccgggagtcgcgcttcttccccactcccgagacaggatagagattccttctgccatcagatgtctttctgcttgactgaactgcacctgtggtctttgaagaataccttacacattgcggatagagacattgggatctaccagtattatgacaagaaagatccaccagcgacagagcatggtaacttagaaaagaagcagaagctggcagagtcacgagattatccttggacgctcaaaaacagacgcccagaaaaactccgagactcgctcaaagagttggaggagctgatgcaaaacagtcggtgtgtgctgagcaaatggaagaacaaatatgtctgtcagctcctttttggttcaggtgtgctggtgtctctaagcctttctgggccgcagctggagaaagtggtgattgacagaagcctggtggggaagctcatctcagacaccatcagtgatgctcttctcacagacagttttatcatcttatcatttttggcacaaaacaaactatgttttattcagtttaccaagaagatggagtcttctgatgtaaacaaaagactggaaaaactctcagccttggattataagattttctattatgaaatacccggcccaataaacaagacaacagagcgacatctagctatcaactgtgttcatgatagagttgtttgctggtggccactggtcaacgatgatgcttggccttgggcccccatttcttctgagaaggacagagccaatctactcctcctgggttatgctcaaggaagactagaggttctgagttctgtccgcacagaatgggacccactggatgttcgctttggcaccaaacagccttatcaggtgttcacagtggagcactccgtaagtgtagacaaagagcccatggctgacagctgcatctatgaatgcattcggaataaaatccagtgtgtgtcagtcaccagaataccactaaagtcaaaggccatcagctgctgcaggaatgttactgaagacaaactgattctgggctgtgaagattcttcgctaattctttatgaaactcaccgtagagtgactctcttagcacagactgaacttttgccttcattaataagctgccacccaagtggtgccattctgctagttggcagcaaccaaggggagttgcaaatttttgatatggctctatcccctattaacatccaactgttggctgaagaccgcttacccagggagactctgcaattcagtaaattatttgatgcctccagcagtcttgttcaaatgcaatggatagctcctcaggttgtttctcagaagggtgaaggtagtgatatctatgatctcctcttcctcaggtttgaaagaggacctttgggtgtgctgttgtttaaactaggcgtcttcactcgaggacagctgggcctgatagacatcatcttccagtacattcactgtgatgagatctatgaggcaataaacatcctgagcagcatgaactgggacactctgggccaccagtgctttatcagcatgagcgccattgtaaaccatcttcttagacagaagctcactccagagagagaagcacagcttgagacaagccttggaaccttctatgctccaacaagaccacttctggattccactatattggaatatagagatcaaatcagcaaatatgcaaggagattcttccatcacttgctcaggtaccagaggtttgaaaaggcatttctcctagctgttgacgttggtgctcgtgacctctttatggatattcattaccttgcactagataaaggtgaattggcactagctgaagtggcaagaaaaagagctagtgacattgatgcagaatcaataacctctggggttgaactcctgggacccttggacagaggggatatgctaaatgaagcatttattggcctgtctttagcacctcaaggagaagactcatttccagataacctccctccctcttgcccaacccacagacatattttacaacaaagaatactgaatggctcttctaacagacaaataattgacagaaggaatgaacttgaaaaagacatctgttctggatttttgatgactaatacctgtaatgcagaagacggagaactgagagaagacggcagagaacaggaaatcagagatggtggttctctcaaaatgattcactttggtctggtgtaa

SEQ ID NO: 417 - DNA, 12507 bp, Homo sapiens
  source 1..12507: mol_type = genomic DNA
atggagcccgaggatctgccatggccgggcgagctggaggaggaggaggaggaggaggaggaggaggaggaggaagaggaggaggctgcagcggcggcggcggcgaacgtggacgacgtagtggtcgtggaggaggtggaggaagaggcggggcgggagttggactccgactctcactacgggccccagcatctggaaagtatagacgacgaggaggacgaggaggccaaggcctggctgcaggcgcaccccggcaggattttgcctccgctgtcgcccccgcagcaccgctactcggagggcgagcggacctccctggagaagattgttccattgacctgtcatgtatggcaacagatagtatatcaaggcaatagtagaacacaaatttctgatactaatgtggtctgtttggaaacaacagctcagcggggttctggggatgatcagaaaacagaatcttggcattgtcttcctcaagaaatggactcttcccaaaccttggatacatcccagactaggtttaatgtgagaacggaagatactgaagtgacagacttcccctctctggaggagggcatattgacgcaatcagaaaatcaagtaaaggaacccaacagagatctcttctgttctccactgctagtcatacaagatagctttgcttctcctgatttgcctttgctgacctgtttgacacaagaccaagaatttgcgcctgattctttatttcatcaaagtgaactaagttttgcacctctgaggggaattcctgataagtctgaagatactgaatggtcttctcgaccatcggaagttagtgaagctttattccaggctactgcagaagtagcttcagacttagcaagcagtcgctttagtgtatctcagcacccgcttataggcagcacagctgttgggtctcagtgcccttttttaccttctgaacaagggaataatgaagagactatttcgtctgttgatgaactgaaaattcccaaagactgtgatcgttatgatgatctttgttcatatatgtcatggaagacacgaaaagatacacagtggcctgaaaacaatttagctgataaagatcaagtttcagttgcaacttcatttgacataactgatgaaaacatagctactaaaagaagtgaccattttgatgctgctcgttcatatgggcagtattggacacaggaagattcatctaagcaggcagaaacatatttaaccaagggcctgcaggggaaggttgagtctgacgtcattactctggatggcctaaatgaaaatgctgttgtatgcagtgaaagagttgctgaactacaaagaaagccaacaagagagtcggaatatcactcttcagatctcagaatgttgaggatgtctcctgacactgtgccaaaggctcctaaacatttaaaagcaggagacacttctaaaggaggcatagctaaagttactcaatccaacttgaagtcaggcatcactaccactcctgttgattcagacattggatctcatttatccttgtcccttgaggacctgtctcagttggctgtaagttctcctctagaaactactactggtcaacacactgatactctcaaccaaaagacattagcagatactcatctaactgaagagactctgaaagtcacagctattcctgaaccagctgaccagaagactgcaacaccaacagtactctctagttcccactcacatagggggaagcccagcattttctaccagcagggcttgccagacagtcatctaactgaagaggctttgaaagtttcagctgctcctggactagctgaccagacaactggcatgtcaactctaacctctacttcctactcacatagagagaagcctggtactttttaccaacaagagttaccagagagtaacttaaccgaagagcctttggaagtttcagctgctcctggcccagtggagcagaagacgggaatacctacagtatcctctacatcccactcacatgtagaggacctcctctttttctatcgacagaccttgccagatggtcatctaactgatcaggctctgaaagtctcagctgtgtctggaccagctgaccagaagactgggacagcaacagtactctctactccccactcacatagagagaagcctggtattttttaccaacaagagttcgcagacagtcatcaaactgaagagactcttactaaagtttcagccactcctggaccagctgaccagaagactgagataccagcagtacagtctagttcttactcacaaagagaaaagcctagtattttgtacccacaggacttagcagacagtcatctacctgaagagggtctgaaagtttcagctgttgctggaccagctgaccagaagactggcctaccaacagtaccctctagtgcatactcacacagagagaagctccttgttttctaccaacaggccttgctggacagccatctacccgaagaggctctgaaagtttcagctgtttctggaccagctgacggaaagactgggacaccagctgtaacctctacttcctctgcgtcctcttcacttggagaaaagcccagtgctttctatcagcagaccttacccaatagtcatctaactgaagaggctctgaaagtatcaattgttcctggaccaggtgatcagaagactgggataccctcagcaccatctagtttctactcacacagagagaagcccattattttttcccagcagaccctgccagactttcttttccctgaagaagctctgaaggtttcagctgtttctgtattggctgcccagaagactgggacaccaacagtgtcctctaattctcactcacatagcgagaaatctagtgttttctaccagcaagagttgccagacagtgatctacctagagaatctctgaaaatgtctgctattcctggactgactgaccagaagactgtcccaacaccaacagtaccttcaggttccttctcacatagagagaagcccagtattttctatcaacaggagtggccagatagttatgcaactgaaaaggctctgaaagtttcaactggccctggaccagctgaccagaagactgagataccagcagtacagtctagttcttacccacagagggagaagcctagtgttttgtacccacaggtgttatcagacagtcatctacctgaagagagtctgaaagtttcagccttccctggaccagctgaccagatgactgacacaccagcagtaccgtctactttctactcacaaagagagaagcctggtattttctaccaacagaccttgccagagagtcatctgcctaaagaggctctgaaaatttcagtagctcctggactagcagaccagaagactggcacaccaactgtaacctcaacttcctactcacaacatagagaaaagcccagcattttccaccagcaggccttgccaggtactcatatacctgaagaggctcagaaagtttcagctgttactggaccaggtaaccagaagacttggataccaagagtactttctaccttctactcacaaagagagaaacctggtattttctatcaacagaccttgccaggtagtcacatacctgaagaggcacagaaagtttcacctgttcttggaccagctgaccagaagactgggacaccaactccaacctctgcttcttactcacacacagagaagcctggtattttctaccaacaggtcttgccagataatcatccaactgaagaggctctgaaaatttcagttgcctctgaaccagttgaccagacaactggcacaccagctgtaacctctacttcctactcacaatatagagagaagcccagcattttctaccaacagtcgttgccaagtagtcatctaactgaagaggctaagaatgtttcagcggttcctggaccagctgaccagaagactgtgataccaattttaccctctactttctactcacacacagagaagcctggtgttttctaccaacaggtcttgccacatagtcatccaactgaagaggctctgaaaatttcagttgcctctgaaccagttgaccagacaactggcacaccaactgtaacctctacttcttactcacaacatacagagaagccgagtattttctaccaacagtcgttgccaggtagtcatctaactgaagaggctaagaacgtttcagcggttcctggaccaggtgaccggaagactgggataccaactttaccctctactttctactcacacacagagaagcctggtagtttctaccaacaggtcttgccacatagtcatctacctgaagaggctttggaagtttcagttgctcctggaccagttgaccagacgattggcacaccaactgtaacctccccttccagctcatttggagagaagcccattgttatctacaaacaggcctttccagagggtcatctacctgaagagtctctgaaagtttcagttgctcctggaccagttggccagacaactggcgcaccaactataacctctccttcctactcacaacatagagcaaagtctggcagtttctaccaactggcattgctaggtagtcaaatacctgaagaggctctcagagtttcttctgctcctggaccagctgaccagacaactggcataccaaccataacctctacttcctactcatttggagagaagccgattgttaactacaaacaggcctttccagatggtcatctacctgaagaggctctgaaagtttccattgtttctggacctactgaaaaaaagactgacataccagcaggacctttaggttccagtgcacttggagagaagcccattactttctaccggcaggctctgctagacagtcctctaaataaagaggttgtgaaagtttcagctgctcctggaccagctgaccagaagactgagacattaccagtacattctactagctactcaaatagggggaagcctgtcattttctaccagcagaccctatcagacagtcatttacctgaagaagctctgaaagttccacctgttcctggaccagatgcccagaagactgagacaccatcagtatcctctagtttatactcatatagagagaagcccattgtcttctaccaacaggccctgccagacagtgagctaactcaagaagctctgaaagtttcagctgttcctcaaccagctgaccagaagactgggttatctactgtaacttcctctttctattcacatacagagaagcctaatatttcttaccagcaagagttgccagatagtcatctaactgaagaggctctgaaagtttcaaatgttcctggaccagctgaccagaagactggggtatcaacagtaacctctacttcctactcacacagagagaagcccattgtttcctaccagcgagagttgccgcattttactgaagcaggtttgaaaattttaagagttcctggaccagctgaccagaagactggaataaacatcctgccctctaattcctacccacagagagagcactctgtcatttcttatgagcaggagttgccagatcttactgaagtaactttgaaagcaataggggttcctgggcctgctgaccagaagactgggatacaaatagcatcctctagttcctactcaaatagagagaaggccagtatttttcatcagcaggagttgccagatgttactgaagaagctttaaatgtttttgttgttcctggacaaggtgaccggaagactgagataccaacagtacctttaagttactactcacgtagagagaagcccagtgttatctctcaacaggagttgccagacagtcatctcacagaagaggctctgaaagtttcacctgtttctataccagcagagcagaagactgggataccaataggactgtctagttcctactcacattcacataaagagaaactcaagatttcaactgtgcatataccagatgaccagaaaactgagtttccagcagctacccttagttcctactcacaaatagagaagcccaagatttcaactgtgattggaccaaatgaccagaagactccatcccagacagcttttcatagttcctattctcaaacagtaaagcccaatattttatttcaacagcagttgccagatagagatcaaagtaaaggtattctaaagatttcagctgtccctgaactaactgatgtgaatactggaaaaccagtatctctctctagttcttattttcacagagagaaatcgaatattttcagtccacaggaattgccaggtagtcatgtaactgaagatgtgctgaaggtttcaacaattcctggaccagctggccagaaaacagtattaccaacagctcttcctagttccttttcacatcgagagaaaccagatattttctatcaaaaggatttgccagatagacatctaactgaagatgctctaaagatctcaagtgctcttgggcaagctgatcaaattaccggattacaaacagttccctctggtacttactcacatggtgagaatcacaagcttgtttcagaacatgtccaaaggctaatagataatttgaattcttctgactccagtgttagctcaaataatgtgcttttaaattctcaggctgatgacagagttgtaataaataaaccagaatctgcaggttttagagatgttggctctgaagaaatccaggatgcagaaaatagtgctaaaactcttaaggaaattcggacacttttgatggaggcagaaaatatggcactgaaacgatgcaattttcctgctccccttgcccgtttcagagatattagtgatatttcatttatacaatctaagaaggtggtttgcttcaaagaaccctcttccacgggtgtatctaatggtgatttgcttcacagacagccattcacagaggaaagcccaagcagcaggtgcatacagaaggatattggcacacagacgaatttgaaatgccggagaggcattgaaaattgggagtttattagttcaactacagttagaagtcctctacaggaagcagagagcaaagtcagtatggcattagaagaaactcttaggcaatatcaagcagccaaatctgtaatgaggtctgaacctgaagggtgtagtggaaccattgggaataaaattattatccctatgatgactgtcataaaaagtgattcaagtagtgatgccagtgatggaaatggttcctgctcgtgggacagtaatttaccagagtctttggaatcagtttctgatgttcttctaaacttctttccatatgtttcacccaagacaagtataacagatagcagggaggaagagggtgtgtcagagagtgaggatggtggtggtagcagtgtagattcactggctgcacatgtgaaaaaccttctgcaatgtgaatcctcactgaatcatgctaaagaaatactcagaaatgcagaggaagaggaaagccgggtacgagcacatgcctggaatatgaagttcaatttagcacatgattgtggatactccatttcagaattaaatgaagatgacaggaggaaagtagaagagatcaaggcagagttatttggtcatggaagaacaactgacttgtccaagggtttacagagtccacggggaatgggatgcaagccagaagctgtatgtagtcacattattattgagagccatgaaaagggatgtttccggactctaacttctgaacatccacaactagatagacacccttgtgctttcagatctgctggaccctcagaaatgaccagaggacggcagaacccatcatcatgcagagccaagcatgtcaacctttctgcatccttagaccagaacaactcccatttcaaagtttggaattccttgcagttaaaaagtcattccccatttcagaactttatacctgatgaattcaaaatcagcaaaggtcttcgaatgccattcgatgaaaagatggacccttggctgtcagaattagtagaacctgcttttgtgccacctaaagaagtggattttcattcttcatcacaaatgccgtccccagaacccatgaaaaagtttactacctccatcactttttcatctcaccgacattctaaatgcatttccaattcctctgttgttaaggttggtgttactgaaggtagccagtgtactggagcatctgtgggggtatttaattctcatttcactgaagaacaaaatcctcccagagatcttaaacagaaaacctcttccccttcatcatttaaaatgcatagtaattcacaagataaagaagtgactattttagcagaaggtagaaggcaaagccaaaaattacctgttgattttgagcgttcttttcaagaagaaaaacccttagaaagatcagattttacaggcagtcattctgagcccagtaccagggcaaattgtagcaatttcaaggaaattcagatttctgataaccatacccttattagcatgggcagaccaagttccaccctaggagtaaacagatcgagttccagactaggagtaaaagagaagaatgtaactataactccagatcttccttcttgcatttttcttgaacaacgagagctctttgaacaaagcaaagccccacgtgcagatgaccatgtgaggaaacaccattctccctctcctcaacatcaggattatgtagctccagaccttccttcttgcatttttcttgaacaacgagaactctttgaacagtgcaaagccccatatgtagatcatcaaatgagagaaaaccattctccccttcctcaaggtcaggattctatagcttcagaccttccgtctcccatttctcttgaacaatgccaaagcaaagcgccaggtgtagatgaccaaatgaataaacaccattttccccttcctcaaggtcaggattgtgtagtggaaaagaataatcaacataagcctaaatcacacatttctaatataaatgttgaagccaagttcaatactgtggtctcccagtcagccccaaatcactgtacattagcagcatctgcatctactcctccttcaaatagaaaagcactttcttgtgttcatataactctttgtcccaagacttcttccaagttggatagtggaactttagatgaaagattccattcattggatgctgcttctaaagcgaggatgaatagtgagtttaactttgacttacatactgtatcttcgagatcactggaaccaacctccaaattattgaccagtaaacctgtagcacaggatcaagaatctttaggttttctaggacctaaatcttcactggatttccaagtcgtacagccttctcttccagacagtaacactattactcaggacttgaaaaccataccttctcagaatagccagatagtaacctccaggcaaatacaagtgaacatttcagatttcgaaggacattccaatccagaggggaccccagtatttgcagatcgattaccagagaagatgaagaccccactttctgctttctctgaaaaattgtcatctgatgcagtcactcagataacaacagaaagtccagaaaagaccctattttcatctgagatttttattaatgctgaagatcgtggacatgaaattatagagcctggtaaccagaagctacgcaaagctcctgtcaagtttgcctcatcatcttcagtccaacaggttactttttctcgcggcacagatggccagcctttattattgccatataagccttctggtagtaccaagatgtattatgttccacaattaagacaaattcctccatctccggattccaaatcagataccaccgttgaaagctcccattcaggatccaatgatgccattgctccagacttcccagctcaggtgctaggcacaagagatgatgacctctcagccactgttaacattaaacataaagaaggaatctacagtaagagggtagtgactaaggcatccttgccagtgggagaaaaacccttgcagaatgaaaatgcagatgcctcagttcaagtgctaatcactggggatgagaacctctcagacaaaaaacagcaagagattcacagtacaagggcagtgactgaggctgcccaggctaaagaaaaagaatctttgcagaaagatactgcagattccagtgctgctgctgctgcagagcactcagctcaagtaggagacccagaaatgaagaacttgccagacactaaagccattacacagaaagaggagatccataggaagaagacagttcccgaggaagcctggccaaacaataaagaatccctacagatcaatattgaagagtccgaatgtcattcagaatttgaaaatactacccgttctgtcttcaggtcagcaaagttttacattcatcatcccgtacacctaccaagtgatcaagatatttgccatgaatctttgggaaagagtgttttcatgagacattcttggaaagatttctttcagcatcatccagacaaacatagagaacacatgtgtcttcctcttccttatcaaaacatggacaagactaagacagattataccagaataaagagcctcagcatcaatgtgaatttgggaaacaaagaagtgatggatactactaaaagtcaagttagagattatccaaaacataatggacaaattagtgatccacaaagggatcagaaggtcaccccagagcaaacaactcagcacactgtgagtttgaatgaactgtggaacaagtatcgggagcgacagaggcaacagagacagcctgagttgggtgacaggaaagaactgtccttggtggaccgacttgatcgtttggctaaaattcttcagaatccaatcacacattctctccaggtctcagaaagtacacatgatgatagcagaggggaacgaagtgtgaaggaatggagtggtagacaacagcagagaaataagcttcagaaaaagaagcggtttaaaagcctagagaaaagccataaaaatacaggcgagcttaaaaaaagcaaggtgctttctcatcatcgagctgggaggtctaatcaaattaaaattgaacagattaaatttgataaatatattctgagtaaacagccaggttttaattatataagcaacacttcttcggattgtcggccctcagaggagagtgagctgctcacagatactaccaccaacatcctttccggcaccacttctactgtcgaatcagatatattgacccaaacagatagagaggtggctctgcacgaaaggagtagctctgtttccactattgacactgcccggctgattcaagcttttggccatgaaagagtatgcttgtcacccagacgaattaaattatatagcagcatcaccaaccaacagaggagataccttgagaagcggagcaaacacagcaagaaagtgctgaatacaggtcatcccctagtgacttctgagcacaccagaaggagacacatccaggtagcaaaccatgtgatttcttctgactctatttcctcttctgccagtagtttcctgagctcaaactctactttttgcaacaagcagaatgtacacatgttaaacaagggcatacaagcaggtaacttggagattgtgaacggtgccaaaaaacacactcgagatgttgggataactttcccaactccaagttccagcgaggctaaattggaagagaacagtgatgtgacttcttggtcagaagaaaaacgtgaagagaaaatgctctttaccggttatcctgaggacagaaagttaaaaaagaacaagaagaattcccatgaaggagtttcctggtttgttcctgtggaaaatgtggagtctagatcaaagaaggaaaacgtgcctaacacttgtggccctggcatctcctggtttgaaccaataaccaagaccagaccctggagggagccactgcgggagcagaactgtcaggggcagcacctggacggtcggggctacctggcaggcccaggcagagaggctggcagagacctactgaggccatttgtgagagcaacccttcaggaatcgcttcagtttcacagacctgacttcatctcccgctctggggagcggataaagcgcctgaagttaatagtccaggagaggaagctgcagagcatgttacagaccgagcgggatgcactattcaacattgacagggaacggcagggccaccagaatcgcatgtgcccgctgcccaagagagtcttcctggctatccagaagaacaagcctatcagcaagaaggaaatgattcagaggtccaaacggatttatgagcagcttccagaagtacagaaaaagagagaagaagagaagagaaaatcagaatataagtcataccggctgcgagcccagctatataaaaagagagtgaccaatcaacttctggggagaaaagttccctgggactga

SEQ ID NO: 418 - DNA, 6411 bp, Homo sapiens
  source 1..6411: mol_type = genomic DNA
atggcggatgtaaccgcccgtagtctgcaatacgagtacaaggcgaactcgaatcttgtgctccaagctgaccgttctctcattgaccggacccgccgggatgaacccacaggagaggtgctgtcccttgttgggaagctggagggcacccgtatgggagacaaggctcaacggaccaaaccgcagatgcaggaggaaagaagagccaagcgaagaaagcgtgatgaggaccggcatgacatcaacaagatgaagggttatactctgctgtcggagggcattgatgagatggtgggcatcatctacaagcccaaaactaaagagactcgggagacctatgaggtgctactcagcttcatccaggctgctcttggggaccagccacgtgatatcctttgtggggcagctgatgaagttctagctgttctaaagaatgaaaagctgcgggacaaggaaaggcgaaaggagattgacctgctgctgggtcaaacagatgataccagataccatgtgctagtgaacctgggcaaaaagatcacagactatggtggagataaggaaatccaaaatatggatgacaacattgatgagacatacggtgtgaatgtgcagtttgagtctgatgaggaggaaggtgatgaagacgtatacggggaggttcgagaagaggcatctgatgatgacatggaaggggacgaggctgtcgtgcgctgcaccctctcggctaatctcgtagcctcaggtgaactgatgagttccaagaagaaggatttgcaccctcgggatattgatgcattttggctgcagcggcagctcagtcgtttctatgatgatgccatcgtgtcgcagaagaaggcagatgaagtattggagattttgaagacggccagtgatgatcgggaatgtgaaaatcagctggttctgctgcttggtttcaacacctttgatttcattaaagtgttgcggcagcacaggatgatgattttatactgtaccttgctggccagtgcacaaagtgaagctgaaaaggaaaggattatgggaaagatggaagctgacccagagctatccaagttcctctaccagcttcatgaaaccgagaaggaggatctgatccgagaggaaaggtcccggagagagcgagtgcgtcagtctcgaatggacacagatctggaaaccatggatctcgaccagggtggagaggcactggctccacggcaggttctggacttggaggacctggtttttacccaagggagccactttatggccaataaacgctgtcagcttcctgatggatccttccgtcgccagcgtaagggctatgaagaggtgcatgtgcctgctctgaagcccaagccctttggctcagaagaacaactgcttccagtggaaaagctgccaaagtatgcccaggctgggtttgagggcttcaaaacactgaatcggatccagagtaagctctaccgtgctgcccttgagacggatgagaatctgctgctgtgtgctcctactggtgctgggaagaccaacgtggccctgatgtgcatgctccgagagattgggaaacacataaacatggacggcaccatcaatgtggatgacttcaagattatctacattgcccccatgcgctccttggtgcaggagatggtgggcagctttggaaagcgcctggccacttatggcatcactgttgctgaactgactggggaccaccagctgtgcaaagaagagatcagtgccactcagatcatcgtctgcacccccgagaagtgggacatcatcacccgcaagggtggtgagcgcacctacacccagctggtgcggctcatcattctggatgagattcatcttctccacgatgacagaggtcctgtcttagaagctttagtggccagggccatccgaaacattgagatgacccaagaggatgtccgactcattggtctcagtgccaccctacccaactatgaagatgtagccacctttctacgtgttgaccctgccaagggtctcttttactttgacaacagcttccgtccagtgcctctggaacagacatatgtgggtatcacagagaaaaaagctatcaagcgtttccagatcatgaatgaaatcgtctatgaaaaaatcatggaacatgctggaaaaaatcaggtgctggtgtttgtccactcccggaaggagactggaaagacagccagggccatccgggacatgtgcctagaaaaggacactctgggtctgtttctgagggagggctcagcctccacagaagtcctgcgaacagaagctgagcagtgcaagaacctagagctgaaggatcttctgccttatggctttgctattcatcacgcaggcatgaccagggttgaccgaacactcgtggaggatctttttgctgataaacatattcaggttttagtttccacagcaactctagcttggggtgtgaatctccctgcacatacagtcatcatcaaaggcacccaggtgtacagtccagagaaggggcgttggacagaactgggagcactggacattctgcagatgctgggacgtgccggaagaccccagtatgacaccaagggtgaaggcatactcatcacatctcatggggagctacagtactacctgtccctcctcaatcaacaacttcctattgaaagccagatggtttcaaagcttcctgacatgctcaatgcagaaatcgtgctaggaaatgtccagaatgccaaggatgcggtgaactggctgggctatgcctacctctatatccgaatgctgcgatccccaaccctctatggcatctctcatgatgacctcaagggagatcccctgctggaccagcgccgactagatctggttcatacagctgccctgatgctggacaagaacaatctggtcaagtacgacaagaagacgggcaacttccaggtgacagaactgggccgtatagccagccactactacatcaccaatgatacagtgcagacttacaaccagctgctgaagcccaccctgagtgagattgagcttttcagggtcttctcattgtcctctgagttcaagaacatcacagtgagagaggaggagaagctggagctgcagaagttgctggagagggtgcctatccctgtaaaggagagcattgaggaacccagtgctaagatcaacgttcttctgcaagccttcatctcacagctgaaattggagggctttgcactgatggctgacatggtgtatgtcacacagtcggctggccggttgatgcgagcgatatttgaaattgtcctgaaccgaggttgggcacagcttacagacaagaccctgaacctctgcaagatgatcgacaaacgcatgtggcagtccatgtgtcctctgcgccagttccggaaactccctgaggaagtagtgaagaagattgagaagaagaatttcccctttgagcgtctgtacgacctgaatcataatgagattggggagcttatccgcatgccaaagatggggaagaccatccacaaatatgtccatctgtttcccaagttggagttgtcagtgcacctgcagcctatcacacgctccaccctgaaggtggagctgaccatcacgccagacttccagtgggatgaaaaggtgcatggttcatccgaggctttttggattctggtggaggatgtggacagcgaggtgattctgcaccatgagtattttctcctcaaggccaagtacgcccaggacgagcacctcattacattcttcgtgcctgtctttgaaccgctgccccctcagtacttcatccgagtggtgtctgaccgctggctctcttgtgagacccagctgcctgtctccttccggcacctgatcttgccggagaagtacccccctccaaccgaacttttggacctgcagcccttgcccgtgtctgctctgagaaacagtgcctttgagagtctttaccaagataaatttcctttcttcaatcccatccagacccaggtgtttaacactgtatacaacagtgacgacaacgtgtttgtgggggcccccacgggcagcgggaagactatttgtgcagagtttgccatcctgcgaatgctgctgcagagctcggaggggcgctgtgtgtacatcacccccatggaggccctggcagagcaggtatacatggactggtacgagaagttccaggacaggctcaacaagaaggtggtactcctgacaggcgagaccagcacagacctgaagctgctgggcaaagggaacattatcatcagcacccctgagaagtgggacatactttcccggcgatggaagcagcgcaagaacgtgcagaacatcaacctcttcgtggtggatgaggtccaccttatcgggggcgagaatgggcctgtcttagaagtgatctgctcccgaatgcgctacatctcctcccagattgagcggcccattcgcattgtggcactcagctcttcgctctccaatgccaaggatgtggcccactggctgggctgcagtgccacctccaccttcaacttccatcccaatgtgcgtcccgtccccttggagctgcacatccagggcttcaacatcagccatacacaaacccgcctgctctccatggccaagcctgtgtaccatgctatcaccaagcactcgcccaagaagcctgtcattgtctttgtgccgtctcgcaagcagacccgcctcactgccattgacatcctcaccacctgtgcagcagacatccaacggcagaggttcttgcactgcaccgagaaggatctgattccgtacctggagaagctaagtgacagcacgctcaaggaaacgctgctaaatggggtgggctacctgcatgaggggctcagccccatggagcgacgcctggtggagcagctcttcagctcaggggctatccaggtggtggtggcttctcggagtctctgctggggcatgaacgtggctgcccacctggtaatcatcatggatacccagtactacaatggcaagatccacgcctatgtggattaccccatctatgacgtgcttcagatggtgggccacgccaaccgccctttgcaggacgatgaggggcgctgtgtcatcatgtgtcagggctccaagaaggatttcttcaagaagttcttatatgagccattgccagtagaatctcacctggaccactgtatgcatgaccacttcaatgctgagatcgtcaccaagaccattgagaacaagcaggatgctgtggactacctcacctggacctttctgtaccgccgcatgacacagaaccccaattactacaacctgcagggcatctcccatcgtcacttgtcggaccacttgtcagagctggtggagcagaccctgagtgacctggagcagtccaagtgcatcagcatcgaggacgagatggacgtggcgcctctgaacctaggcatgatcgccgcctactattacatcaactacaccaccattgagctcttcagcatgtccctcaatgccaagaccaaggtgcgagggcttatcgagatcatctccaatgcagcagagtatgagaacattcccatccggcaccatgaagacaatctcctgaggcagttggctcagaaggtcccccacaagctgaataaccctaagttcaatgatccgcacgtcaagaccaacctgctcctgcaggctcacttgtctcgcatgcagctgagtgctgagttgcagtcagatacggaggaaatccttagtaaggcaatccggctcatccaggcctgcgtggatgtcctttccagcaatgggtggctcagccctgctctggcagctatggaactggcccagatggtcacccaagccatgtggtccaaggactcatacctgaagcagctgccacacttcacctctgagcatatcaaacgttgcacagacaagggagtggagagtgttttcgacatcatggagatggaggatgaagaacggaacgcgttgcttcagctgactgacagccagattgcagatgtggctcgcttttgtaaccgctaccctaatatcgaactatcttatgaggtggtagataaggacagcatccgcagtggcgggccagttgtggtgctggtgcagctggagcgagaggaggaagtcacaggccctgtcattgcgcctctcttcccgcagaaacgtgaagagggctggtgggtggtgattggagatgccaagtccaatagcctcatctccatcaagaggctgaccttgcagcagaaggccaaggtgaagttggactttgtggccccagccactggtgcccacaactacactctgtacttcatgagtgacgcttacatgggatgtgaccaggagtacaaattcagcgtggatgtgaaagaagctgagacagacagtgattcagattga

SEQ ID NO: 419 - DNA, 2328 bp, Homo sapiens
  source 1..2328: mol_type = genomic DNA
atggcgccggtgggcgggggcgggcgcccggtcggcggaccggcccgcgggcgcctcctcctggcggcgccggtgctgctggtgctgctgtgggcgctgggggcccggggccagggcagcccccagcagggcacgatcgtgggcatgaggctggcgagctgcaacaagtcgtgtgggacgaacccggatggcatcatcttcgtgtccgagggcagcaccgtgaacctgaggctgtacggctacagcctgggcaacatctccagcaacctgatctccttcaccgaggtggacgatgccgagaccctccacaagtccaccagctgcctcgagctcaccaaggacctggtcgtccagcagctggtcaacgtgagccgcgggaacacgtccggcgtgctggtggtgctcaccaagttcctccggaggagcgagagcatgaagctgtatgcactgtgcacccgggcccagcccgacgggccctggctgaagtggacggacaaggactcactgctcttcatggtggaggagcctgggaggttcctgcctctctggctgcacattctcctaattacggtgctgctggtgctgtcgggcatattttctggcctcaacctcgggcttatggccctggaccccatggagctgcgcatcgtgcagaactgtggcaccgagaaggagaggcgctatgcccgcaagattgagcccatccggcgcaagggcaactaccttctctgctcgttgctcctagggaacgtgctggtcaacacctccctcacaatccttctagacaacctcatcgggtccggcctcatggcggtggcctcctccaccattggcattgtcatctttggggagatcctacctcaggccctgtgctcccgacatgggctggctgtgggtgccaacaccatccttctcaccaaattctttatgctactcaccttccccctcagttttcccattagcaagctcctggacttttttctgggccaggagattcgcactgtttacaaccgggagaagctgatggagatgttgaaggtgacggagccctataatgacctcgtgaaagaggagctcaatatgatccagggtgccctggaactacggaccaaaactgtagaggatatcatgacccagctccaggactgcttcatgatccgcagcgatgccatcctggacttcaacaccatgtcggagataatggaaagcggctatactcgcatcccggtgttcgaagacgagcagtccaatattgtagatattctctacgtcaaagacttggcctttgtggaccccgatgactgcacccccctcaagactatcactcgcttctataaccacccggtgcactttgtcttccatgacaccaagttggatgccatgctggaggagttcaagaaggggaagtcccacctggccatcgtgcagaaggtaaacaacgagggtgagggtgaccccttctacgaggtcctgggcctggtcaccctggaggacgtgatcgaggagatcatcaagtcggagatcctggacgagtccgacatgtacactgacaaccgaagccggaagcgggtgtctgagaagaacaagcgtgacttctctgccttcaaggatgcggacaatgagctcaaagtgaaaatctccccgcagctcctcctggccgctcatcgcttcctagccacagaggtctctcagtttagcccctccctgatatcagagaagatcctgctgcggctactcaagtacccagatgtcattcaggaactcaagtttgacgagcacaataagtactacgcccgccattacctgtacacccgaaataagccggccgactacttcatcctcatcctgcaggggaaggtggaggtggaggcagggaaggagaacatgaagtttgagacgggcgccttctcctactatgggactatggccctgacctcggtcccctccgaccgttccccagcacaccccaccccactcagccgctcagcctccctcagttacccagaccgcacagacgtctcaactgcagcaaccttggcaggcagcagcaaccagtttggcagctctgtcctgggccagtacatctctgacttcagcgtccgggcactcgtggacttgcagtacatcaagatcactcggcagcagtaccagaacgggctgctggcttctcgcatggagaacagccctcagtttcccatagacgggtgcaccacccacatggagaacttggccgagaagtctgagctgcctgtggtggacgagaccacaactcttctcaacgagcgtaactccttgctgcacaaagcctcccacgagaatgccatctga

SEQ ID NO: 420 - DNA, 2085 bp, Homo sapiens
  source 1..2085: mol_type = genomic DNA
atggccaagatcaacacccaatactcccacccctccaggacccacctcaaggtaaagacctcagaccgagatctcaatcgcgctgaaaatggcctcagcagagcccactcgtcaagtgaggagacatcgtcagtgctgcagccggggatcgccatggagaccagaggactggctgactccgggcagggctccttcaccggccaggggatcgccaggctgtcgcgcctcatcttcttgctgcgcaggtgggctgccaggcatgtgcaccaccaggaccagggaccggactcttttcctgatcgtttccgtggagccgagcttaaggaggtgtccagccaagaaagcaatgcccaggcaaatgtgggcagccaggagccagcagacagagggagaagcgcctggcccctggccaaatgcaacactaacaccagcaacaacacggaggaggagaagaagacgaaaaagaaggatgcgatcgtggtggacccgtccagcaacctgtactaccgctggctgaccgccatcgccctgcctgtcttctataactggtatctgcttatttgcagggcctgtttcgatgagctgcagtccgagtacctgatgctgtggctggtcctggactactcggcagatgtcctgtatgtcttggatgtgcttgtacgagctcggacaggttttctcgagcaaggcttaatggtcagtgataccaacaggctgtggcagcattacaagacgaccacgcagttcaagctggatgtgttgtccctggtccccaccgacctggcttacttaaaggtgggcacaaactacccagaagtgaggttcaaccgcctactgaagttttcccggctctttgaattctttgaccgcacagagacaaggaccaactaccccaatatgttcaggattgggaacttggtcttgtacattctcatcatcatccactggaatgcctgcatctactttgccatttccaagttcattggttttgggacagactcctgggtctacccaaacatctcaatcccagagcatgggcgcctctccaggaagtacatttacagtctctactggtccaccttgacccttaccaccattggtgagaccccaccccccgtgaaagatgaggagtatctctttgtggtcgtagacttcttggtgggtgttctgatttttgccaccattgtgggcaatgtgggctccatgatctcgaatatgaatgcctcacgggcagagttccaggccaagattgattccatcaagcagtacatgcagttccgcaaggtcaccaaggacttggagacgcgggttatccggtggtttgactacctgtgggccaacaagaagacggtggatgagaaggaggtgctcaagagcctcccagacaagctgaaggctgagatcgccatcaacgtgcacctggacacgctgaagaaggttcgcatcttccaggactgtgaggcagggctgctggtggagctggtgctgaagctgcgacccactgtgttcagccctggggattatatctgcaagaagggagatattgggaaggagatgtacatcatcaacgagggcaagctggccgtggtggctgatgatggggtcacccagttcgtggtcctcagcgatggcagctacttcggggagatcagcattctgaacatcaaggggagcaagtcggggaaccgcaggacggccaacatccgcagcattggctactcagacctgttctgcctctcaaaggacgatctcatggaggccctcaccgagtaccccgaagccaagaaggccctggaggagaaaggacggcagatcctgatgaaagacaacctgatcgatgaggagctggccagggcgggcgcggaccccaaggaccttgaggagaaagtggagcagctggggtcctccctggacaccctgcagaccaggtttgcacgcctcctggctgagtacaacgccacccagatgaagatgaagcagcgtctcagccaactggaaagccaggtgaagggtggtggggacaagcccctggctgatggggaagttcccggggatgctacaaaaacagaggacaaacaacagtga

SEQ ID NO: 421 - DNA, 2199 bp, Homo sapiens
  source 1..2199: mol_type = genomic DNA
atgctggcgagacgacagcgagatcctctccaggccctgcggcgccgcaatcaggagctgaagcaacaggttgatagtttgctttctgagagccaactgaaagaagctctagaacccaataaaagacaacatatttatcaaagatgtatccagttaaagcaggcaatagatgaaaataaaaatgctcttcaaaaattaagcaaagctgatgaatctgcacctgttgcaaactataatcagagaaaagaagaggagcatactcttttggacaagcttacccaacaactgcagggccttgctgtgacaataagcagagaaaatataactgaagttggggcacctactgaagaagaggaagaaagtgaaagtgaagatagtgaagacagtggtggggaggaagaagatgcagaggaggaagaggaagagaaagaggaaaatgaatctcacaaatggtcaaccggtgaagaatacatcgctgttggagattttactgctcagcaagttggagatcttacatttaagaaaggggaaattctccttgtaattgaaaaaaaacctgatggttggtggatagctaaggatgccaaaggaaatgaaggtcttgttcccagaacctacctagagccttatagtgaagaagaagaaggccaagagtcaagtgaagagggcagtgaagaagatgtagaggcggtggatgaaacagcagatggagcagaagttaagcaaagaactgatccccactggagtgctgttcagaaagcgatttcagaggcgggcatcttctgtcttgttaatcatgtctcgttttgctacctaatagttctgatgcgaaataggatggagactgtggaagacaccaatggatctgaaacagggttcagggcatggaatgtacagagcagaggacgtatatttctggtttctaagcctgtgctccaaataaacactgttgatgtgttaactacgatgggagctattcctgcagggttcaggccttccacgctctcacagcttctggaggaagggaatcaatttcgagcaaattacttcttacaaccagagctcatgccttcacaactggccttcagagatctgatgtgggatgctacagaaggcactattaggtcgagaccaagtcgtatttcattgattctgacattatggagctgtaaaatgattcctcttccaggaatgagcatacaggttctcagcagacatgtacgcctctgtctatttgatggtaataaggttctgagcaacattcatacagtcagagccacatggcaacctaaaaagcccaaaacatggaccttttctccccaggttactcgcatcttaccatgtttgcttgatggtgattgctttatcaggtctaattctgcatctccagatcttggaatattatttgaacttggaatttcttatattcgcaattcaactggtgaaagaggagagttaagctgtggctgggtgtttcttaaactttttgatgccagtggagttcctattccagcaaaaacttatgagcttttcttgaatggtggtactccttatgaaaaaggtattgaagtggacccttcaatatccagaagagcacacggcagtgttttctaccagattatgacaatgagaaggcagcctcaacttctagtgaaactgagatccttgaacagaagatcaagaaatgtactaagtctactgccagaaacattaattggaaatatgtgttctattcacttgttgatattttatcgacaaattcttggagatgtgctcctgaaagacaggatgagcttgcaaagtactgatttaattagccatcccatgctggccaccttccccatgctcttggagcagcctgatgtgatggatgctctcaggagttcgtgggctggaaaagaaagcacattaaaaagatcagagaagagagacaaagagttcctgaagtccacgtttctcctggtttaccatgactgcgtgctcccacttctccactccacacgcctacccccattcaggtgggcagaagaagagactgagactgcacggtggaaagttatcactgacttccttaagcaaaaccaagaaaaccagggcgccctccaagctctgctgtcaccagacggagttcatgaaccttttgacctttcagagcagacctatgacttcttgggtgaaatgagaaagaatgcagtgtga

SEQ ID NO: 422 - DNA, 3000 bp, Homo sapiens
  source 1..3000: mol_type = genomic DNA
atggggccggccccgctgccgctgctgctgggcctcttcctccccgcgctctggcgtagagctatcactgaggcaagggaagaagccaagccttacccgctattcccgggaccttttccagggagcctgcaaactgaccacacaccgctgttatcccttcctcacgccagtgggtaccagcctgccttgatgttttcaccaacccagcctggaagaccacatacaggaaacgtagccattccccaggtgacctctgtcgaatcaaagcccctaccgcctcttgccttcaaacacacagttggacacataatactttctgaacataaaggtgtcaaatttaattgctcaatcagtgtacctaatatataccaggacaccacaatttcttggtggaaagatgggaaggaattgcttggggcacatcatgcaattacacagttttatccagatgatgaagttacagcaataatcgcttccttcagcataaccagtgtgcagcgttcagacaatgggtcgtatatctgtaagatgaaaataaacaatgaagagatcgtgtctgatcccatctacatcgaagtacaaggacttcctcactttactaagcagcctgagagcatgaatgtcaccagaaacacagccttcaacctcacctgtcaggctgtgggcccgcctgagcccgtcaacattttctgggttcaaaacagtagccgtgttaacgaacagcctgaaaaatccccctccgtgctaactgttccaggcctgacggagatggcggtcttcagttgtgaggcccacaatgacaaagggctgaccgtgtccaagggagtgcagatcaacatcaaagcaattccctccccaccaactgaagtcagcatccgtaacagcactgcacacagcattctgatctcctgggttcctggttttgatggatactccccgttcaggaattgcagcattcaggtcaaggaagctgatccgctgagtaatggctcagtcatgatttttaacacctctgccttaccacatctgtaccaaatcaagcagctgcaagccctggctaattacagcattggtgtttcctgcatgaatgaaataggctggtctgcagtgagcccttggattctagccagcacgactgaaggagccccatcagtagcacctttaaatgtcactgtgtttctgaatgaatctagtgataatgtggacatcagatggatgaagcctccgactaagcagcaggatggagaactggtgggctaccggatatcccacgtgtggcagagtgcagggatttccaaagagctcttggaggaagttggccagaatggcagccgagctcggatctctgttcaagtccacaatgctacgtgcacagtgaggattgcagccgtcaccagagggggagttgggcccttcagtgatccagtgaaaatatttatccctgcacacggttgggtagattatgccccctcttcaactccggcgcctggcaacgcagatcctgtgctcatcatctttggctgcttttgtggatttattttgattgggttgattttatacatctccttggccatcagaaaaagagtccaggagacaaagtttgggaatgcattcacagaggaggattctgaattagtggtgaattatatagcaaagaaatccttctgtcggcgagccattgaacttaccttacatagcttgggagtcagtgaggaactacaaaataaactagaagatgttgtgattgacaggaatcttctaattcttggaaaaattctgggtgaaggagagtttgggtctgtaatggaaggaaatcttaagcaggaagatgggacctctctgaaagtggcagtgaagaccatgaagttggacaactcttcacagcgggagatcgaggagtttctcagtgaggcagcgtgcatgaaagacttcagccacccaaatgtcattcgacttctaggtgtgtgtatagaaatgagctctcaaggcatcccaaagcccatggtaattttacccttcatgaaatacggggacctgcatacttacttactttattcccgattggagacaggaccaaagcatattcctctgcagacactattgaagttcatggtggatattgccctgggaatggagtatctgagcaacaggaattttcttcatcgagatttagctgctcgaaactgcatgttgcgagatgacatgactgtctgtgttgcggacttcggcctctctaagaagatttacagtggcgattattaccgccaaggccgcattgctaagatgcctgttaaatggatcgccatagaaagtcttgcagaccgagtctacacaagtaaaagtgatgtgtgggcatttggcgtgaccatgtgggaaatagctacgcggggaatgactccctatcctggggtccagaaccatgagatgtatgactatcttctccatggccacaggttgaagcagcccgaagactgcctggatgaactgtatgaaataatgtactcttgctggagaaccgatcccttagaccgccccaccttttcagtattgaggctgcagctagaaaaactcttagaaagtttgcctgacgttcggaaccaagcagacgttatttacgtcaatacacagttgctggagagctctgagggcctggcccagggctccacccttgctccactggacttgaacatcgaccctgactctataattgcctcctgcactccccgcgctgccatcagtgtggtcacagcagaagttcatgacagcaaacctcatgaaggacggtacatcctgaatgggggcagtgaggaatgggaagatctgacttctgccccctctgctgcagtcacagctgaaaagaacagtgttttaccgggggagagacttgttaggaatggggtctcctggtcccattcgagcatgctgcccttgggaagctcattgcccgatgaacttttgtttgctgacgactcctcagaaggctcagaagtcctgatgtga

SEQ ID NO: 423 - DNA, 1026 bp, Homo sapiens
  source 1..1026: mol_type = genomic DNA
atgtcggtgctggatgcgctttgggaggatcgggatgtccgtttcgacctgtccgcgcagcaaatgaaaacaagacctggagaagtccttattgattgtttagattccattgaagacaccaaaggaaataatggagatagaggtagactcttggtaacaaatttaagaattctctggcactctttggcattatcaagagtcaatgtttctgtcggttacaattgcatattgaatattacaacaaggactgctaactctaaattacgaggccaaactgaagctctctatatactaacaaaatgtaacagtactcgttttgaatttatatttacaaatttggttcctggaagccctagactttttacttctgtgatggcagtacacagagcttatgaaacttctaaaatgtatcgtgattttaaattaagaagtgcactaattcagaacaagcaactaagactgttgccacaagaacatgtatatgataaaataaatggagtttggaatttatccagtgatcagggcaatttaggaaccttttttattaccaatgtgagaattgtgtggcatgcaaatatgaatgatagttttaatgtcagtataccatatctgcaaattcgttcaataaagattagagattcaaaatttggtttagctcttgtcatagaaagctctcagcagagtggtggatatgttcttggctttaaaatagatcctgtggaaaaactacaagaatcagttaaggaaatcaattcacttcacaaagtctattctgccagtcccatatttggagttgattatgagatggaagaaaagccccagccgctcgaagctctgacagtcgaacaaattcaagatgatgtagaaatagactctgatggtcacacggatgcttttgtggcttattttgctgatggcaataagcaacaagatcgtgaacctgtattttcagaagaactggggcttgcaatagagaaattgaaggatggattcaccctacagggactttgggaagtaatgagttga

SEQ ID NO: 424 - DNA, 1677 bp, Homo sapiens
  source 1..1677: mol_type = genomic DNA
atgccctggaggaggcgcaggaaccgggtgagtgccctggagggcggccgggaggaagaggcgcccccggaggctgccgctgtgcctccggcgctgttaacgtccccgcagcagacggaggcggcggccgagcggattctgctccggggcatcttcgagatcgggagggacagttgtgacgtggtgctgagcgagcgagcactgcggtggcggcccattcagcccgagcgcccggcgggtgattctaagtatgacttgctatgtaaagaagaatttattgaactcaaagacatattctctgtgaaactgaaacggcgttgttctgttaaacagcagagaagtggtactttattaggtatcacactcttcatctgcttgaaaaaggaacaaaataaactaaagaattctacacttgatcttattaatttaagtgaagaccactgtgacatatggtttagacagttcaagaaaatattggcaggctttccaaacagaccgaagtcattaaaaatactccttaacccccaaagtcacaaaaaagaagctacccaggtttattatgagaaggttgaacctctgttgaagcttgcaggaataaaaactgatgtaacaataatggaatatgaagggcacgctctgtcactgcttaaggaatgtgaactccagggatttgatggtgggcatcggaaaccattgttcgcaatacattggagtgtacagagattgttcactggcatgcaaacgttagaaccaagtgttgtctgtgttggtggagatggatctgctagcgaagtagcccatgctttgcttctgagagctcagaagaatgctgggatggaaacagaccgaatcctgactcctgtcagagcacagcttccacttggcttaataccagcaggatctaccaatgtattggcacattctcttcatggagttcctcatgtgataactgcaacattgcacattataatggggcatgtacagctggtcgacgtctgcaccttcagcaccgctggcaagcttcttcgctttgggttctcagccatgtttggctttggtggaagaactttggctctggcagaaaaatatcgatggatgtcccctaaccaacggagagattttgctgttgttaaggcactggcaaaacttaaggcagaagactgtgaaatatcatttttaccatttaacagctctgatgatgtgcaagaaaggagggcacagggatctcccaaatctgactgtaatgatcaatggcaaatgatccagggtcagttcttgaatgtcagcattatggcaattccttgcctgtgttcagtggcacctagaggcttggcacctaataccagattaaataatggaagtatggctcttataattgcccgaaacacttctcggccagaatttataaaacacctgaaaagatatgccagtgtaaaaaatcagttcaattttccatttgttgagacttacactgttgaggaagtaaaagttcatccaaggaataatactggtggatataatccagaggaggaggaggatgaaactgcttcagaaaattgtttcccttggaatgtagatggtgacttaatggaagttgcatcagaggtccatattagattgcatccaagacttatcagtctttatggaggaagcatggaagaaatgattccaaagtaa

SEQ ID NO: 425 - DNA, 1071 bp, Homo sapiens
  source 1..1071: mol_type = genomic DNA
atgaccaaatcgtacagcgagagtgggctgatgggcgagcctcagccccaaggtcctccaagctggacagacgagtgtctcagttctcaggacgaggagcacgaggcagacaagaaggaggacgacctcgaaaccatgaacgcagaggaggactcactgaggaacgggggagaggaggaggacgaagatgaggacctggaagaggaggaagaagaggaagaggaggatgacgatcaaaagcccaagagacgcggccccaaaaagaagaagatgactaaggctcgcctggagcgttttaaattgagacgcatgaaggctaacgcccgggagcggaaccgcatgcacggactgaacgcggcgctagacaacctgcgcaaggtggtgccttgctattctaagacgcagaagctgtccaaaatcgagactctgcgcttggccaagaactacatctgggctctgtcggagatcctgcgctcaggcaaaagcccagacctggtctccttcgttcagacgctttgcaagggcttatcccaacccaccaccaacctggttgcgggctgcctgcaactcaatcctcggacttttctgcctgagcagaaccaggacatgcccccccacctgccgacggccagcgcttccttccctgtacacccctactcctaccagtcgcctgggctgcccagtccgccttacggtaccatggacagctcccatgtcttccacgttaagcctccgccgcacgcctacagcgcagcgctggagcccttctttgaaagccctctgactgattgcaccagcccttcctttgatggacccctcagcccgccgctcagcatcaatggcaacttctctttcaaacacgaaccgtccgccgagtttgagaaaaattatgcctttaccatgcactatcctgcagcgacactggcaggggcccaaagccacggatcaatcttctcaggcaccgctgcccctcgctgcgagatccccatagacaatattatgtccttcgatagccattcacatcatgagcgagtcatgagtgcccagctcaatgccatatttcatgattag

SEQ ID NO: 426 - DNA, 1227 bp, Homo sapiens
  source 1..1227: mol_type = genomic DNA
atgaggactgactcgggggctcggctggaggagggccacctgcgtcctccacgagctcttccacctgtgccaagtcaagatgatattccacttagtcgtcctaagaaaaagaagcccagaacaaaaaacacaccagcaagtgcttctttggaaggccttgctcagactgctggtcgaaggccctctgagggcaatgagccatcaactaaagaactcaaagagcacccagaggctcctgttcaaagaagacagaaaaagacaaggctacctcttgaattggagacttcctccacccaaaagaagtcatctagttcatctttattacgaaatgaaaatggtattgatgcggagccagctgaggaggcagttattcaaaaacctcggaggaagacaaagaaaacccagccagcagaattacagtatgccaatgagctaggagtagaagatgaagacataatcactgatgagcaaactactgtggaacagcagtctgtattcactgcacccactggcattagccagcctgtaggcaaagtatttgtggaaaaaagccggagattccaggctgctgatcgttcagagttgataaagaccacagaaaacatagatgtgtcaatggacgtgaagccttcctggaccaccagagatgtggcacttacagtgcaccgggctttcaggatgattggtctcttttctcatggattcttggctggctgtgctgtgtggaatattgttgtgatatatgttctagcaggagatcagctatccaacctctcaaaccttctgcaacaatacaagaccctagcgtatccattccagagtcttctgtacttgcttttggctctgagtacaatttcagcttttgacaggattgactttgctaaaatatcagtagcaatccgaaattttttggccctggatcctacagctttagcatctttcttgtactttactgctcttatactatctctgagtcagcaaatgacaagtgacagaatccacctttacacaccttcttctgttaatggtagcctctgggaagcaggaattgaggaacagattctccagccatggattgtggtgaatctcgtggtggctcttctggttggattatcttggctatttttgtcttataggccaggcatggatcttagtgaagagttaatgttctcctcagaggtggaagaatatcctgataaagagaaagaaatcaaagcctcttcataa

SEQ ID NO: 427 - DNA, 1083 bp, Homo sapiens
  source 1..1083: mol_type = genomic DNA
atggacagcagtaattgcaaagttattgctcctctcctaagtcaaagataccggaggatggtcaccaaggatggccacagcacacttcaaatggatggcgctcaaagaggtcttgcatatcttcgagatgcttggggaatcctaatggacatgcgctggcgttggatgatgttggtcttttctgcttcttttgttgtccactggcttgtctttgcagtgctctggtatgttctggctgagatgaatggtgatctggaactagatcatgatgccccacctgaaaaccacactatctgtgtcaagtatatcaccagtttcacagctgcattctccttctccctggagacacaactcacaattggttatggtaccatgttccccagtggtgactgtccaagtgcaatcgccttacttgccatacaaatgctcctaggcctcatgctagaggcttttatcacaggtgcttttgtggcgaagattgcccggccaaaaaatcgagctttttcaattcgctttactgacacagcagtagtagctcacatggatggcaaacctaatcttatcttccaagtggccaacacccgacctagccctctaaccagtgtccgggtctcagctgtactctatcaggaaagagaaaatggcaaactctaccagaccagtgtggatttccaccttgatggcatcagttctgacgaatgtccattcttcatctttccactaacgtactatcactccattacaccatcaagtcctctggctactctgctccagcatgaaaatccttctcactttgaattagttgtattcctttcagcaatgcaggagggcactggagaaatatgccaaaggaggacatcctacctaccgtctgaaatcatgttacatcactgttttgcatctctgttgacccgaggttccaaaggtgaatatcaaatcaagatggagaattttgacaagactgtccctgaatttccaactcctctggtttctaaaagcccaaacaggactgacctggatatccacatcaatggacaaagcattgacaattttcagatctctgaaacaggactgacagaataa

SEQ ID NO: 428 - DNA, 1218 bp, Homo sapiens
  source 1..1218: mol_type = genomic DNA
atggcagccagcgggaagaccagcaagtccgaaccgaaccatgttatcttcaagaagatctcccgggacaaatcggtgaccatctacctggggaacagagactacatagaccatgtcagccaagtccagcctgtggatggtgtcgtgttggttgatcctgatcttgtgaagggaaagaaagtgtatgtcactctgacctgcgccttccgctatggccaagaggacattgacgtgatcggcttgaccttccgcagggacctgtacttctcccgggtccaggtgtatcctcctgtgggggccgcgagcacccccacaaaactgcaagagagcctgcttaaaaagctggggagcaacacgtacccctttctcctgacgtttcctgactacttgccctgttcagtgatgttgcagccagctccacaagattcagggaagtcctgtggggttgactttgaggtcaaagcattcgccacagacagcaccgatgccgaagaggacaaaatccccaagaagagctccgtgcgattactgatccgcaaagtacagcatgccccacttgagatgggtccccagccccgagctgaggcggcctggcagttcttcatgtctgacaagcccctgcaccttgcggtctctctcaacaaagagatctatttccatggggagcccatccctgtgaccgtgactgtcaccaataacacagagaagaccgtgaagaagattaaagcattcgtggaacaggtggccaatgtggttctctactcgagtgattattacgtcaagcccgtggctatggaggaagcgcaagaaaaagtgccaccaaacagcactttgaccaagacgctgacgctgctgcccttgctggctaacaatcgagaaaggagaggcattgccctggatgggaaaatcaagcacgaggacacaaaccttgcctccagcaccatcattaaggagggcatagaccggaccgtcctgggaatcctggtgtcttaccagatcaaggtgaagctcacagtgtcaggctttctgggagagctcacctccagtgaagtcgccactgaggtcccattccgcctcatgcaccctcagcctgaggacccagctaaggaaagttatcaggatgcaaatttagtttttgaggagtttgctcgccataatctgaaagatgcaggagaagctgaggaggggaagagagacaagaatgacgttgatgagtga

SEQ ID NO: 429 - DNA, 636 bp, Homo sapiens
  source 1..636: mol_type = genomic DNA
atgatttccagaatggagaagatgacgatgatgatgaagatattgattatgtttgctcttggaatgaactactggtcttgctcaggtttcccagtgtacgactacgatccatcctccttaagggatgccctcagtgcctctgtggtaaaagtgaattcccagtcactgagtccgtatctgtttcgggcattcagaagctcattaaaaagagttgaggtcctagatgagaacaacttggtcatgaatttagagttcagcatccgggagactacatgcaggaaggattctggagaagatcccgctacatgtgccttccagagggactactatgtgtccacagctgtttgcagaagcaccgtgaaggtatctgcccagcaggtgcagggcgtgcatgctcgctgcagctggtcctcctccacgtctgagtcttacagcagcgaagagatgatttttggggacatgttgggatctcataaatggagaaacaattatctatttggtctcatttcagacgagtccataagtgaacaattttatgatcggtcacttgggatcatgagaagggtattgcctcctggaaacagaaggtacccaaaccaccggcacagagcaagaataaatactgactttgagtaa

SEQ ID NO: 430 - DNA, 1305 bp, Homo sapiens
  source 1..1305: mol_type = genomic DNA
atgctgaggtgcctgtatcattggcacaggccagtgctgaaccgtaggtggagtaggctgtgccttccgaagcagtatctattcacaatgaagttgcagtctcccgaattccagtcacttttcacagaaggactgaagagtctgacagaattatttgtcaaagagaatcacgaattaagaatagcaggaggagcagtgagggatttattaaatggagtaaagcctcaggatatagattttgccaccactgctacccctactcaaatgaaggagatgtttcagtcggctgggattcggatgataaacaacagaggagaaaagcacggaacaattactgccaggcttcatgaagaaaattttgagattactacactacggattgatgtcaccactgatggaagacatgctgaggtagaatttacaactgactggcagaaagatgcggaacgcagagatctcactataaattctatgtttttaggttttgatggcactttatttgactactttaatggttatgaagatttaaaaaataagaaagttagatttgttggacatgctaaacagagaatacaagaggattatcttagaattttaagatacttcaggttttatgggagaattgtagacaaacctggtgaccatgatcctgagactttggaagcaattgcagaaaatgcaaaaggcttggctggaatatcaggagaaaggatttgggtggaactgaaaaaaattcttgttggtaaccatgtaaatcatttgattcaccttatctatgatcttgatgtggctccttatataggtttacctgctaatgcaagtttagaagaatttgacaaagtcagtaaaaatgttgatggtttttcaccaaagccagtgactcttttggcctcattattcaaagtacaagatgatgtcacaaaattggatttgaggttgaagatcgcaaaagaggagaaaaaccttggcttatttatagttaaaaataggaaagatttaattaaagcaacagatagttcagacccattgaaaccctatcaagacttcattatagattctagggaacctgatgcaactactcgtgtatgtgaactactgaagtaccaaggagagcactgtctcctaaaggaaatgcagcagtggtccattcctccatttcctgtaagtggccatgacatcagaaaagtgggcatttcttcaggaaaagaaattggggctctattacaacagttgcgagaacagtggaaaaaaagtggttaccaaatggaaaaagatgaacttctgagttacataaagaagacctaa

SEQ ID NO: 431 - DNA, 3645 bp, Homo sapiens
  source 1..3645: mol_type = genomic DNA
atggaaagatttcgtctggagaagaagttacctggtcctgatgaagaagctgttgtggatcttggcaaaactagctcaactgtgaacaccaagtttgaaaaagaagaactagaaagtcatagagctgtatatattggtgttcacgtcccgtttagtaaagagagtcgtcggcgtcataggcatcgcggacacaaacatcaccaccggagaagaaaagataaagaatcagataaagaagatggacgggaatctccttcttatgatacaccatcccagagagttcagtttatccttggtactgaagatgatgatgaagaacatattccccatgatctcttcacggaaatggatgaactgtgttacagagatggagaagaatatgaatggaaagaaactgctagatggctgaaatttgaagaggatgttgaagatggcggtgaccgatggagtaaaccttatgtggcaactctctctttgcacagtctttttgaactaaggagttgcatcctcaatggaacagtcatgctggatatgagagcaagcactctagatgaaatagcagatatggtattagacaacatgatagcttctggccaattagacgagtccatacgagagaatgtcagagaagctcttctgaagagacatcatcatcagaatgagaaaagattcaccagtcggattcctcttgttcgatcttttgcagatataggcaagaaacattctgaccctcacttgcttgaaaggaatggggaaggcctttcagcctcccgccactctttgcgaacaggtctgtctgcctcaaacctttccttgagaggagaatcacctttatctcttcttcttggtcatcttcttccttcttcaagagctggaacccctgcaggctcaaggtgtacaaccccagtacccacccctcaaaacagtcctccttctagccctagcatcagccgcctgacctccagaagttcccaagagagtcagcgtcaggccccagaactactggtttcacctgccagtgatgatattcccacagtagtaattcatccgcctgaggaagacttagaagcagcgctgaaaggcgaggagcagaagaatgaggaaaatgttgacttaactccaggtattttggcctctccccagtctgctcctggaaacttggacaatagtaaaagtggagaaattaaaggtaatggaagtggtggaagcagagaaaatagtactgttgacttcagcaaggttgatatgaatttcatgagaaaaattcctacgggtgctgaggcatccaacgtcctggtgggcgaagtagactttttggaaaggccaataattgcatttgtgagactggctcctgctgtcctccttacagggttgactgaggtccctgttccaaccaggtttttgtttttgttattgggtccagcgggcaaggcaccacagtaccatgaaattggacgatcaatagccactctcatgacagatgagattttccatgatgtagcttataaagcaaaagacagaaatgacctcttatctggaattgatgaatttttagatcaagtaactgtcctacctccaggagagtgggatccttctatacgcatagaaccaccaaaaagtgtcccttctcaggaaaagagaaagattcctgtgtttcacaatggatctacccccacactgggtgagactcctaaagaggccgctcatcatgctgggcctgagctacagaggactggacggctttttggtggtttgatacttgacatcaaaaggaaagcaccttttttcttgagtgacttcaaggatgcattaagcctgcagtgcctggcctcgattcttttcctatactgtgcctgtatgtctcctgtaatcacttttggagggctgcttggagaagctacagaaggcagaataagtgcaatagagtctctttttggagcatcattaactgggattgcctattcattgtttgctgggcaacctctaacaatattggggagcacaggtccagttctagtgtttgaaaaaattttatataaattctgcagagattatcaactttcttatctgtctttaagaaccagtattggtctgtggacttcttttttgtgcattgttttggttgcaacagatgcaagcagccttgtgtgttatattactcgatttacagaagaggcttttgcagcccttatttgcatcatattcatctacgaggctttggagaagctctttgatttaggagaaacatatgcatttaatatgcacaacaacttagataaactgaccagctactcatgtgtatgtactgaacctccaaaccccagcaatgaaactctagcacaatggaagaaagataatataacagcacacaatatttcctggagaaatcttactgtttctgaatgtaaaaaacttcgtggtgtattcttggggtcagcttgtggtcatcatggaccttatattccagatgtgctcttttggtgtgtcatcttgtttttcacaacattttttctgtcttcattcctcaagcaatttaagaccaagcgttactttcctaccaaggtgcgatcgacaatcagtgattttgctgtatttctcacaatagtaataatggttacaattgactaccttgtaggagttccatctcctaaacttcatgttcctgaaaaatttgagcctactcatccagagagagggtggatcataagcccactgggagataatccttggtggaccttattaatagctgctattcctgctttgctttgtaccattctcatctttatggatcaacaaatcacagctgtaattataaacagaaaggaacacaaattgaagaaaggagctggctatcaccttgatttgctcatggttggcgttatgttgggagtttgctctgtcatgggacttccatggtttgtggctgcaacagtgttgtcaataagtcatgtcaacagcttaaaagttgaatctgaatgttctgctccaggggaacaacccaagtttttgggaattcgtgaacagcgggttacagggctaatgatttttattctaatgggcctctctgtgttcatgacttcagtcctaaagtttattccaatgcctgttctgtatggtgttttcctttatatgggagtttcctcattaaaaggaatccagttatttgaccgtataaaattatttggaatgcctgctaagcatcagcctgatttgatatacctccgttatgtgccgctctggaaggtccatattttcacagtcattcagcttacttgtttggtccttttatgggtgataaaagtttcagctgctgcagtggtttttcccatgatggttcttgcattagtgtttgtgcgcaaactcatggacctgtgtttcacgaagagagaacttagttggcttgatgatcttatgccagaaagtaagaaaaagaaagaagatgacaaaaagaaaaaagagaaagaggaagctgaacggatgcttcaagatgatgatgatactgtgcaccttccatttgaagggggaagtctcttgcaaattccagtcaaggccctaaaatatagtcctgataaacctgtgagtgtgaaaataagttttgaagatgaaccaagaaagaaatacgtggatgctgaaacttcattatag

SEQ ID NO: 432 - DNA, 900 bp, Homo sapiens
  source 1..900: mol_type = genomic DNA
atggcagagttgggcctaaatgagcaccatcaaaatgaagttattaattatatgcgttttgctcgttcaaagagaggcttgagactcaaaactgtagattcctgcttccaagacctcaaggagagcaggctggtggaggacaccttcaccatagatgaagtctctgaagtcctcaatggattacaagctgtggttcatagtgaggtggaatctgagctcatcaacactgcctataccaatgtgttacttctgcgacagctgtttgcacaagctgagaagtggtatcttaagctacagacagacatctctgaacttgaaaaccgagaattattagaacaagttgcagaatttgaaaaagcagagattacatcttcaaacaaaaagcccatcttagatgtcacaaagccaaaacttgctccacttaatgaaggtggaacagcagaactcctaaacaaggaaattttaagacttcaagaagagaatgagaaattgaagtcaaggttgaagaccattgaaatacaggctacaaatgcactggatgaaaagtcaaaactagaaaaagcactgcaagatttacagcttgatcaaggaaatcaaaaggattttataaaggcccaagacttaagtaacttagaaaacactgtcgctgccttaaagagtgagtttcagaagacacttaatgacaagacagaaaaccagaagtcactggaggagaatctggcgacagccaagcacgatctactcagggttcaggagcagctgcacatggctgaaaaggaattagaaaagaaatttcagcaaacagcagcttatcgaaacatgaaagagattcttaccaagaagaatgaccaaatcaaagatctgaggaaaagactggcacaatatgaacctgaagattaa

SEQ ID NO: 433 - DNA, 1053 bp, Homo sapiens
  source 1..1053: mol_type = genomic DNA
atgggggctggggccagtgctgaggagaagcactccagggagctggaaaagaagctgaaagaggacgctgagaaggatgctcgaaccgtgaagctgctgcttctgggtgccggtgagtccgggaagagcaccatcgtcaagcagatgaagattatccaccaggacgggtactcgctggaagagtgcctcgagtttatcgccatcatctacggcaacacgttgcagtccatcctggccatcgtacgcgccatgaccacactcaacatccagtacggagactctgcacgccaggacgacgcccggaagctgatgcacatggcagacactatcgaggagggcacgatgcccaaggagatgtcggacatcatccagcggctgtggaaggactccggtatccaggcctgttttgagcgcgcctcggagtaccagctcaacgactcggcgggctactacctctccgacctggagcgcctggtaaccccgggctacgtgcccaccgagcaggacgtgctgcgctcgcgagtcaagaccactggcatcatcgagacgcagttctccttcaaggatctcaacttccggatgttcgatgtgggcgggcagcgctcggagcgcaagaagtggatccactgcttcgagggcgtgacctgcatcatcttcatcgcggcgctgagcgcctacgacatggtgctagtggaggacgacgaagtgaaccgcatgcacgagagcctgcacctgttcaacagcatctgcaaccaccgctacttcgccacgacgtccatcgtgctcttccttaacaagaaggacgtcttcttcgagaagatcaagaaggcgcacctcagcatctgtttcccggactacgatggacccaacacctacgaggacgccggcaactacatcaaggtgcagttcctcgagctcaacatgcggcgcgacgtgaaggagatctattcccacatgacgtgcgccaccgacacgcagaacgtcaaatttgtcttcgacgctgtcaccgacatcatcatcaaggagaacctcaaagactgtggcctcttctga

SEQ ID NO: 434 - DNA, 945 bp, Homo sapiens
  source 1..945: mol_type = genomic DNA
atgggctcgcaggccctgcccccggggcccatgcagaccctcatctttttcgacatggaggccactggcttgcccttctcccagcccaaggtcacggagctgtgcctgctggctgtccacagatgtgccctggagagcccccccacctctcaggggccacctcccacagttcctccaccaccgcgtgtggtagacaagctctccctgtgtgtggctccggggaaggcctgcagccctgcagccagcgagatcacaggtctgagcacagctgtgctggcagcgcatgggcgtcaatgttttgatgacaacctggccaacctgctcctagccttcctgcggcgccagccacagccctggtgcctggtggcacacaatggtgaccgctacgacttccccctgctccaagcagagctggctatgctgggcctcaccagtgctctggatggtgccttctgtgtggatagcatcactgcgctgaaggccctggagcgagcaagcagcccctcagaacacggcccaaggaagagctatagcctaggcagcatctacactcgcctgtatgggcagtcccctccagactcgcacacggctgagggtgatgtcctggccctgctcagcatctgtcagtggagaccacaggccctgctgcggtgggtggatgctcacgccaggcctttcggcaccatcaggcccatgtatggggtcacagcctctgctaggaccaagccaagaccatctgctgtcacaaccactgcacacctggccacaaccaggaacactagtcccagccttggagagagcaggggtaccaaggatcttcctccagtgaaggaccctggagccctatccagggaggggctgctggccccactgggtctgctggccatcctgaccttggcagtagccacactgtatggactatccctggccacacctggggagtag

SEQ ID NO: 435 - DNA, 1149 bp, Homo sapiens
  source 1..1149: mol_type = genomic DNA
atggatggtgaaacagcagaggagcaggggggccctgtgcccccgccagttgcacccggcggacccggcttgggcggtgctccgggggggcggcgggagcccaagaagtacgcagtgaccgacgactaccagttgtccaagcaggtgctgggcctgggtgtgaacggcaaagtgctggagtgcttccatcggcgcactggacagaagtgtgccctgaagctcctgtatgacagccccaaggcccggcaggaggtagaccatcactggcaggcttctggcggcccccatattgtctgcatcctggatgtgtatgagaacatgcaccatggcaagcgctgtctcctcatcatcatggaatgcatggaaggtggtgagttgttcagcaggattcaggagcgtggcgaccaggctttcactgagagagaagctgcagagataatgcgggatattggcactgccatccagtttctgcacagccataacattgcccaccgagatgtcaagcctgaaaacctactctacacatctaaggagaaagacgcagtgcttaagctcaccgattttggctttgctaaggagaccacccaaaatgccctgcagacaccctgctatactccctattatgtggcccctgaggtcctgggtccagagaagtatgacaagtcatgtgacatgtggtccctgggtgtcatcatgtacatcctcctttgtggcttcccacccttctactccaacacgggccaggccatctccccggggatgaagaggaggattcgcctgggccagtacggcttccccaatcctgagtggtcagaagtctctgaggatgccaagcagctgatccgcctcctgttgaagacagaccccacagagaggctgaccatcactcagttcatgaaccacccctggatcaaccaatcgatggtagtgccacagaccccactccacacggcccgagtgctgcaggaggacaaagaccactgggacgaagtcaaggaggagatgaccagtgccttggccactatgcgggtagactacgaccaggtgaagatcaaggacctgaagacctctaacaaccggctcctcaacaagaggagaaaaaagcaggcaggcagctcctctgcctcacagggctgcaacaaccagtag

SEQ ID NO: 436 - DNA, 2679 bp, Homo sapiens
  source 1..2679: mol_type = genomic DNA
atgtcggagcgggccgcggatgacgtcaggggggagccgcgccgcgcggcggcggcggcgggcggagcagcggccgcggccgcccggcagcagcagcagcagcagcagcagcagcagccgccgcctccgcagccccagcggcagcagcacccgccaccgccgccacggcgcacacggccggaggacggcgggcccggcgccgcctccacctcggccgccgcaatggcgacggtcggggagcgcaggcctctgcccagtcctgaagtgatgctgggacagtcgtggaatctgtgggttgaggcttccaaacttcctgggaaggacgggacagaattggacgaaagtttcaaggagtttgggaaaaaccgcgaagtcatggggctctgtcgggaagacatgccaatatttggtttctgtccagcccatgatgatttctacttggtggtgtgtaacgactgtaatcaggttgtcaaaccgcaggcatttcaatcacattatgaaagaagacatagctcatccagcaagccgcctttggccgttcctcccacttcagtattttccttcttcccttctctgtccaaaagcaaaggaggcagtgcaagtggaagcaaccgttcttccagtggaggtgttcttagcgcatcctcatcaagttccaagttgttgaaatcacccaaagagaaactgcagctcagggggaacaccaggccaatgcatcccattcagcaaagtagagttccccatggtagaatcatgacaccctctgtgaaagtggaaaagattcatccgaaaatggatggcacactactgaaatctgcggtggggccaacctgtcctgctactgtgagttccttagtcaagcctggccttaactgcccctcaataccaaagccaaccttgccttcacctggacagattctgaatggcaaagggcttcctgcaccgcccactctggaaaagaaacctgaagacaattccaataataggaaatttttaaataagagattatcagaaagagagtttgatcctgacatccactgtggggttattgatctcgacaccaagaagccctgcacccggtctttgacatgcaagacacattccttaacccagcgcagggctgtccagggtagaagaaaacgatttgatgtgttattagccgagcacaaaaacaaaaccagggaaaaggaattgattcgccatccggactctcagcaaccaccgcagcctctcagggacccgcatcccgcccctcctagaacgtcacaggagccgcaccaaaaccctcacggagtgattccttccgaatcaaagccttttgtagctagtaaacctaaacctcacacccccagtcttccaaggcctccaggctgccctgctcagcaaggtgggagtgcccccattgaccctcctccagtccatgaatctccacaccctcccctgcctgccactgagccagcttctcggttatccagtgaggagggcgaaggcgatgacaaagaagagtctgttgaaaaactggactgtcattattcaggtcatcatcctcagccagcatctttttgcacatttgggagccggcagataggaagaggctattacgtgtttgactccaggtggaatcgacttcgctgcgccctcaacctcatggtggagaagcatctgaatgcacagctatggaagaaaatcccaccagtgcccagtaccacctcacccatctccacacgtattcctcaccggacaaactctgtgccgacatcacaatgtggagtcagctatctggcagcagccaccgtctctacatccccagtcctgctctcatctacctgcatctccccaaatagcaaatcggtaccagctcatggaaccacactaaatgcacagcctgctgcttcaggggcgatggatcctgtgtgcagtatgcaatccagacaagtgtcctcttcatcctcatccccttccacgccctctggcctttcctcggttccttcctcccccatgtccaggaaacctcagaaattgaaatccagcaaatctttgaggcccaaggagtcttctggtaacagcactaactgtcaaaatgccagtagcagtaccagtggcggctcaggaaagaaacgcaaaaacagttccccactgttggttcactcttcctcctcctcttcctcctcctcctcttcttctcattccatggagtcttttaggaaaaactgtgtggctcactctgggcctccctacccctcaacggtaacatcttcccatagcatcggcctcaactgtgtgacgaataaagcaaatgcggtgaacgtccggcatgaccagtcagggaggggcccccccaccgggagccctgctgaatccatcaagaggatgagtgtgatggtgaacagcagtgattctactctttctcttgggccattcattcaccagtccaatgaactgcctgtcaactcccacggcagtttttcccactcacacactcctctagacaaactcataggaaagaaaagaaagtgctcacccagctcgagcagcatcaacaacagcagcagcaaacccacaaaggttgccaaagtgccagccgtgaacaatgtccacatgaaacacacaggcaccatcccaggggcacaaggactgatgaacagttccctccttcatcagccaaaggcacgtccctga

SEQ ID NO: 437 - DNA, 2031 bp, Homo sapiens
  source 1..2031: mol_type = genomic DNA
atgagggtcctgggtgggcgctgcggggcgctgctggcgtgtctcctcctagtgcttcccgtctcagaggcaaactttttgtcaaagcaacaggcttcacaagtcctggttaggaagcgtcgtgcaaattctttacttgaagaaaccaaacagggtaatcttgaaagagaatgcatcgaagaactgtgcaataaagaagaagccagggaggtctttgaaaatgacccggaaacggattatttttatccaaaatacttagtttgtcttcgctcttttcaaactgggttattcactgctgcacgtcagtcaactaatgcttatcctgacctaagaagctgtgtcaatgccattccagaccagtgtagtcctctgccatgcaatgaagatggatatatgagctgcaaagatggaaaagcttcttttacttgcacttgtaaaccaggttggcaaggagaaaagtgtgaatttgacataaatgaatgcaaagatccctcaaatataaatggaggttgcagtcaaatttgtgataatacacctggaagttaccactgttcctgtaaaaatggttttgttatgctttcaaataagaaagattgtaaagatgtggatgaatgctctttgaagccaagcatttgtggcacagctgtgtgcaagaacatcccaggagattttgaatgtgaatgccccgaaggctacagatataatctcaaatcaaagtcttgtgaagatatagatgaatgctctgagaacatgtgtgctcagctttgtgtcaattaccctggaggttacacttgctattgtgatgggaagaaaggattcaaacttgcccaagatcagaagagttgtgaggttgtttcagtgtgccttcccttgaaccttgacacaaagtatgaattactttacttggcggagcagtttgcaggggttgttttatatttaaaatttcgtttgccagaaatcagcagattttcagcagaatttgatttccggacatatgattcagaaggcgtgatactgtacgcagaatctatcgatcactcagcgtggctcctgattgcacttcgtggtggaaagattgaagttcagcttaagaatgaacatacatccaaaatcacaactggaggtgatgttattaataatggtctatggaatatggtgtctgtggaagaattagaacatagtattagcattaaaatagctaaagaagctgtgatggatataaataaacctggacccctttttaagccggaaaatggattgctggaaaccaaagtatactttgcaggattccctcggaaagtggaaagtgaactcattaaaccgattaaccctcgtctagatggatgtatacgaagctggaatttgatgaagcaaggagcttctggaataaaggaaattattcaagaaaaacaaaataagcattgcctggttactgtggagaagggctcctactatcctggttctggaattgctcaatttcacatagattataataatgtatccagtgctgagggttggcatgtaaatgtgaccttgaatattcgtccatccacgggcactggtgttatgcttgccttggtttctggtaacaacacagtgccctttgctgtgtccttggtggactccacctctgaaaaatcacaggatattctgttatctgttgaaaatactgtaatatatcggatacaggccctaagtctatgttccgatcaacaatctcatctggaatttagagtcaacagaaacaatctggagttgtcgacaccacttaaaatagaaaccatctcccatgaagaccttcaaagacaacttgccgtcttggacaaagcaatgaaagcaaaagtggccacatacctgggtggccttccagatgttccattcagtgccacaccagtgaatgccttttataatggctgcatggaagtgaatattaatggtgtacagttggatctggatgaagccatttctaaacataatgatattagagctcactcatgtccatcagtttggaaaaagacaaagaattcttaa

SEQ ID NO: 438 - DNA, 561 bp, Homo sapiens
  source 1..561: mol_type = genomic DNA
atgggattgctagacagactttcagtcttgcttggcctgaagaagaaggaggttcatgttttgtgccttgggctagataatagtggcaaaacgacgatcattaacaaacttaaaccttcaaatgctcaatctcaaaatatccttccaacaataggattcagcatagagaaattcaaatcatccagtttgtcatttacagtgtttgacatgtcaggtcaaggaagatacagaaatctctgggaacactattataaagaaggccaagctattatttttgtcattgatagtagtgatagattaagaatggttgtggccaaagaagaactcgatactcttctgaatcatccagatattaaacaccgtcgaattccaatcttattctttgcaaataaaatggatcttagagatgcagtgacatctgtaaaagtgtctcagttgctgtgtttagagaacatcaaagataaaccctggcatatttgtgctagtgatgccataaaaggagaaggcttgcaagaaggtgtagactggcttcaagatcagatccagactgtgaagacatga

SEQ ID NO: 439 - DNA, 3726 bp, Homo sapiens
  source 1..3726: mol_type = genomic DNA
atgattatgtttcctctttttgggaagatttctctgggtattttgatatttgtcctgatagaaggagactttccatcattaacagcacaaacctacttatctatagaggagatccaagaacccaagagtgcagtttcttttctcctgcctgaagaatcaacagacctttctctagctaccaaaaagaaacagcctctggaccgcagagaaactgaaagacagtggttaatcagaaggcggagatctattctgtttcctaatggagtgaaaatctgcccagatgaaagtgttgcagaggctgtggcaaatcatgtgaagtattttaaagtccgagtgtgtcaggaagctgtctgggaagccttcaggactttttgggatcgacttcctgggcgtgaggaatatcattactggatgaatttgtgtgaggatggagtcacaagtatatttgaaatgggcacaaattttagtgaatctgtggaacatagaagcttaatcatgaagaaactgacttatgcaaaggaaactgtaagcagctctgaactgtcttctccagttcctgttggtgatacttcaacattgggagacactactctcagtgttccacatccagaggtggacgcctatgaaggtgcctcagagagcagcttggaaaggccagaggagagtattagcaatgaaattgagaatgtgatagaagaagccacaaaaccagcaggtgaacagattgcagaattcagtatccaccttttggggaagcagtacagggaagaactacaggattcctccagctttcaccaccagcaccttgaagaagaatttatttcagaggttgaaaatgcatttactgggttaccaggctacaaggaaattcgtgtacttgaatttaggtcccccaaggaaaatgacagtggcgtagatgtttactatgcagttaccttcaatggtgaggccatcagcaataccacctgggacctcattagccttcactccaacaaggtggaaaaccatggccttgtggaactggatgataaacccactgttgtttatacaatcagtaacttcagagattatattgctgagacattgcagcagaattttttgctggggaactcttccttgaatccagatcctgattccctgcagcttatcaatgtgagaggagttttgcgtcaccaaactgaagatctagtttggaacacccaaagttcaagtcttcaggcaacgccgtcatctattctggataatacctttcaagctgcatggccctcagcagatgaatccatcaccagcagtattccaccacttgatttcagctctggtcctccctcagccactggcagggaactctggtcagaaagtcctttgggtgatttagtgtctacacacaaattagcctttccctcgaagatgggcctcagctcttccccagaggttttagaggttagcagcttgactcttcattctgtcaccccggcagtgcttcagactggcttgcctgtggcttctgaggaaaggacttctggatctcacttggtagaagatggattagccaatgttgaagagtcagaagattttctttctattgattcattgccttcaagttcattcactcaacctgtgccaaaagaaacaataccatccatggaagactctgatgtgtccttaacatcttcaccatatctgacctcttctataccttttggcttggactccttgacctccaaagtcaaagaccaattaaaagtgagccctttcctgccagatgcatccatggaaaaagagttaatatttgacggtggtttaggttcagggtctgggcaaaaggtagatctgattacttggccatggagtgagacttcatcagagaagagcgctgaaccactgtccaagccgtggcttgaagatgatgattcacttttgccagctgagattgaagacaagaaactagttttagttgacaaaatggattccacagaccaaattagtaagcactcaaaatatgaacatgatgacagatccacacactttccagaggaagagcctcttagtgggcctgctgtgcccatcttcgcagatactgcagctgaatctgcgtctctaaccctccccaagcacatatcagaagtacctggtgttgatgattactcagttaccaaagcacctcttatactgacatctgtagcaatctctgcctctactgataaatcagatcaggcagatgccatcctaagggaggatatggaacaaattactgagtcatccaactatgaatggtttgacagtgaggtttcaatggtaaagccagatatgcaaactttgtggactatattgccagaatcagagagagtttggacaagaacttcttccctagagaaattgtccagagacatattggcaagtacaccacagagtgctgacaggctctggttatctgtgacacagtctaccaaattgcctccaaccacaatctccaccctgctagaggatgaagtaattatgggtgtacaggatatttcgttagaactggaccggataggcacagattactatcagcctgagcaagtccaagagcaaaatggcaaggttggtagttatgtggaaatgtcaacaagtgttcactccacagagatggttagtgtggcttggcccacagaaggaggagatgacttgagttatacccagacttcaggagctttggtggttttcttcagcctccgagtgactaacatgatgttttcagaagatctgtttaataaaaactccttggagtataaagccctggagcaaagattcttagaattgctggttccctatctccagtcaaatctcacggggttccagaacttagaaatcctcaacttcagaaatggcagcattgtggtgaacagtcgaatgaagtttgccaattctgtccctcctaacgtcaacaatgcggtgtacatgattctggaagacttttgtaccactgcctacaataccatgaacttggctattgataaatactctcttgatgtggaatcaggtgatgaagccaacccttgcaagtttcaggcctgtaatgaattttcagagtgtctggtcaacccctggagtggagaagcaaagtgcagatgcttccctggatacctgagtgtggaagaacggccctgtcagagtctctgtgacctacagcctgacttctgcttgaatgatggaaagtgtgacattatgcctgggcacggggccatttgtaggtgccgggtgggtgagaactggtggtaccgaggcaagcactgtgaggaatttgtgtctgagcccgtgatcataggcatcactattgcctccgtggttggacttcttgtcatcttttctgctatcatctacttcttcatcaggactctccaagcacaccatgacaggagtgaaagagagagtcccttcagtggctccagcaggcagcctgacagcctctcatctattgagaatgctgtgaagtacaaccccgtgtatgaaagtcacagggctggatgtgagaagtatgagggaccctatcctcagcatcccttctacagctctgctagcggagacgtgattggtgggctgagcagagaagaaatcagacagatgtatgagagcagtgagctttccagagaggaaattcaagagagaatgagagttttggaactgtatgccaatgatcctgagtttgcagcttttgtgagagagcaacaagtggaagaggtttaa

SEQ ID NO: 440 - DNA, 1797 bp, Homo sapiens
  source 1..1797: mol_type = genomic DNA
atgaagccaacaggtacagacccaaggatcttatctatagctgctgaagttgcaaaaagccctgagcagaatgtccctgttatactgttgaagttaaaagaaataataaacatcacacctttaggaagctcagagttgaagaaaatcaaacaagatatatattgttatgatctcattcaatattgcctcttggtcctcagtcaagattattctcgaatccagggtggttggactacaatttcccagcttacacagatattaagccattgctgtgtgggcttggagccaggagaagatgcagaggaattttacaatgaattacttccatcagctgcagaaaattttctagttttggggagacaattacaaacatgttttatcaatgcagctaaggctgaagaaaaagatgaattactacactttttccaaattgtgactgattctctcttctggcttttgggaggccatgttgaacttattcagaatgtactacaaagtgatcatttcttacatttactgcaagctgacaatgtccaaataggatctgcagtcatgatgatgctacagaatatactacagatcaacagtggtgatttactcagaataggaagaaaagccctgtattcaattttagatgaagttattttcaagcttttttcaactcctagtccagttataagaagtactgctacaaaactcctactgttgatggctgaatcccatcaggaaattttgattttactgagacaaagtacctgctacaaaggactcagacgtctactaagtaaacaggaaactgggactgaattcagtcaagaacttagacagcttgttggccttttaagcccaatggtctatcaggaagtagaagagcagaaactacatcaagcagcatgcttgattcaagcctattggaagggttttcagacaagaaagagattaaagaagcttccatctgctgtgattgctttgcagaggagtttcagatccaaacgatcaaagatgttgctggagataaataggcagaaggaagaagaggacctcaaattacaattgcaacttcaaagacagagagccatgagactttcccgagaattgcagctgagtatgctcgaaatagttcatccaggtcaggtggagaaacactatcgggaaatggaagagaaatcagcactgattatccagaaacattggagagggtacagggaaaggaaaaattttcaccaacagaggcagtctctcatagagtataaagcagctgtcacacttcaaagagcagcgcttaaattcctagcgaagtgccgtaagaaaaagaaactatttgctccttggcgaggactccaagaactcactgatgcacgccgagttgaactgaagaaacgagtggatgactatgtcagaagacatttgggctctccaatgtcagatgtggtcagtagggagctccatgcccaagctcaagaacgactgcaacactactttatgggcagggccctagaagagcgagcccagcagcacagagaagctctgatagcacagatcagcaccaacgttgaacagctaatgaaggcaccaagtctgaaggaggcagaagggaaagaacctgagctcttcctaagtagatccaggcctgtggcagccaaggccaagcaggcccatctcacaaccctgaagcacatacaagcaccctggtggaagaagcttggagaagaatctggagatgagattgatgttccaaaggatgagcttagtatagaattagaaaatttattcattggtggaaccaaaccaccttag

SEQ ID NO: 441 - DNA, 1047 bp, Homo sapiens
  source 1..1047: mol_type = genomic DNA
atgaatggcacagaaggccctaacttctacgtgcccttctccaatgcgacgggtgtggtacgcagccccttcgagtacccacagtactacctggctgagccatggcagttctccatgctggccgcctacatgtttctgctgatcgtgctgggcttccccatcaacttcctcacgctctacgtcaccgtccagcacaagaagctgcgcacgcctctcaactacatcctgctcaacctagccgtggctgacctcttcatggtcctaggtggcttcaccagcaccctctacacctctctgcatggatacttcgtcttcgggcccacaggatgcaatttggagggcttctttgccaccctgggcggtgaaattgccctgtggtccttggtggtcctggccatcgagcggtacgtggtggtgtgtaagcccatgagcaacttccgcttcggggagaaccatgccatcatgggcgttgccttcacctgggtcatggcgctggcctgcgccgcacccccactcgccggctggtccaggtacatccccgagggcctgcagtgctcgtgtggaatcgactactacacgctcaagccggaggtcaacaacgagtcttttgtcatctacatgttcgtggtccacttcaccatccccatgattatcatctttttctgctatgggcagctcgtcttcaccgtcaaggaggccgctgcccagcagcaggagtcagccaccacacagaaggcagagaaggaggtcacccgcatggtcatcatcatggtcatcgctttcctgatctgctgggtgccctacgccagcgtggcattctacatcttcacccaccagggctccaacttcggtcccatcttcatgaccatcccagcgttctttgccaagagcgccgccatctacaaccctgtcatctatatcatgatgaacaagcagttccggaactgcatgctcaccaccatctgctgcggcaagaacccactgggtgacgatgaggcctctgctaccgtgtccaagacggagacgagccaggtggccccggcctaa

SEQ ID NO: 442 - DNA, 3993 bp, Homo sapiens
  source 1..3993: mol_type = genomic DNA
atggggaccgcctcgtcgctcgtgagccccgcgggcggggaagtgatcgaggacacgtacggggcgggcggcggcgaggcctgcgagatcccggtggaggtgaagcccaaggcccgcctgctgcgcaactcgttccgccgaggcgcgggggcggcagcaggggccgggcccgggtcgctgccccgcggggtgggcgcgggcgggctgctgggggccagcttcaagtccactggctcgtcggtgccagagctggagtacgcggcggccgagtacgagcggctcaggaaggagtacgagatctttcgcgtcagcaagaaccaggagttgttgtccatgggccgccgcgaggccaagctggacacggagaacaagcggctgcgggccgaactgcaggcacttcaaaaaacgtatcagaagatacttcgagaaaaagaaagtgctttagaagcgaaataccaagcaatggagagagcagcaacatttgaacatgacagagataaagttaaaaggcaattcaagatttttagggagaccaaagaaaatgaaattcaggacttactgagggccaagagggagttggagagcaaacttcagaggctacaggctcagggtatccaagtatttgatcctggggagtctgattcagatgacaactgtacagatgtcactgctgctggaacccaatgtgaatattggactggcggagccttgggaagtgaaccttccataggaagcatgatccagcttcagcagtccttcagaggccctgagtttgcccatagttctatagatgtggaaggaccctttgcaaatgttaatagagatgactgggatattgctgtagctagtttattacaagttactcctctgttttcacattctctgtggagtaacactgtcagatgttacctcatttatacagatgaaacccagcctgagatggatcttttccttaaggactattcacctaaacttaagagaatgtgcgagacaatgggatattttttccatgctgtttattttccaatagatgttgaaaatcaatacctcactgtaagaaaatgggaaattgagaaaagttctttagttattttatttattcacttaacattaccaagccttttattggaagactgtgaagaagcttttctgaaaaaccctgaaggaaaacctcgattaatctttcatcgtttggaagatggaaaagtcagttctgactctgtccagcaattgattgatcaagtttctaatctaaacaagaccagcaaagccaagatcattgatcactcaggagatcctgcagaaggagtatataaaacttatatttgtgtagaaaagattattaaacaggacatactgggttttgagaacacagacttggagactaaggatttgggcagtgaggattccattccagaagaagatgattttggtgatgttctgtgggacatacatgatgaacaagagcaaatggaaacttttcagcaggcttctaattcagcccatgagttgggatttgagaaatattaccaacgccttaatgatctagtggcagcaccagccccgattccacctcttctcgtgtctggaggaccaggttctgggaagtctcttcttttatcaaagtggattcaattacaacagaagaattcccccaacacactgattctttcccattttgtgggaaggcccatgtcaaccagctcagagtcctccttgattattaaacgactaactctaaagttgatgcagcactcttggtcagtctctgctctgacactggatcctgctaagcttctggaagaatttccacgttggctggaaaaactctctgctcgtcatcaaggcagcatcatcatcgttattgattctatagatcaagttcagcaagttgaaaaacacatgaaatggctgatagatccactgccagtgaatgtaagagtaattgtttctgtgaatgtagaaacatgccctccagcatggaggttgtggcctacacttcatcttgatcccttaagtccaaaagatgcaaaatctattataattgcagaatgccactctgtagacattaaattgagtaaagagcaggagaagaagctagaacgacactgtcgttctgctacaacctgcaatgccctttatgtcacccttttcggcaaaatgatcgcgcgtgctgggagagcaggcaatttagataaaatccttcatcagtgtttccagtgtcaagatactctttcattatatagacttgttctgcactctatccgggagtccatggcaaatgatgtggataaagagctaatgaagcagatcctctgccttgtcaatgttagtcacaatggtgtgagtgaatcagaactgatggaactctatcctgagatgtcctggactttcttgacctcccttattcacagtttatacaaaatgtgtttgttgacttatggatgtggcttgcttaggtttcaacatctgcaggcttgggaaacagtgagattggagtacctggaaggccccactgttacttcttcatacaggcaaaagctaatcaactatttcaccttgcagctaagtcaggacagagtgacttggagaagtgcagatgaactcccgtggctttttcagcagcagggaagtaaacagaagctgcatgattgccttcttaatctctttgtgtctcaaaacctttataaaaggggacactttgctgagttgctgagttattggcagtttgttggcaaagacaaaagtgcaatggcaacagaatacttcgattcattgaagcagtatgagaaaaactgcgaaggcgaggacaacatgagttgcttagctgatctttatgaaaccttggggcgatttctcaaggatctaggccttctcagtcaggccatagtacctttgcagaggtctttagagattcgagaaacagctttagatcccgatcacccaagagtagcccagtccctccaccaactagcaagtgtatacgtgcagtggaagaagtttggcaatgcagaacaactgtataaacaggcgttggaaatctcagaaaatgcttatggtgcggaccatccatatactgctcgtgaacttgaagcacttgcaactttgtaccagaaacaaaataaatatgaacaagctgaacattttaggaaaaaatcctttaaaattcatcagaaagctataaagaaaaaaggcaacttgtacggatttgcccttttacgtagacgggctttacagttagaagagcttacattaggtaaggacacacctgataatgctcggaccctcaatgaactgggtgttctctactatcttcaaaataacctggaaacagctgaccagtttctgaagcgttccttagaaatgagggagcgagttctaggaccagatcaccctgactgtgctcagtctttgaataatctggcagctctatgcaatgaaaagaaacagtatgataaagcagaagaactttatgaaagagctttagatattcggagacgtgcattagctcctgatcacccttctttggcatatacggtgaagcatcttgccatcttgtataagaaaatggggaaacttgacaaagctgtacctttgtatgaattggctgttgaaattcgacagaaatcttttggcccaaagcaccctagtgtagctactgccttggtgaacttagctgttctttatagccaaatgaaaaaacacgttgaagctttgccattatatgaaagagcattaaagatttatgaagatagcctgggtcggatgcatcctcgagttggagaaacactgaaaaatttagctgtgcttagctatgaaggaggagattttgaaaaagctgctgaattatacaaaagggcaatggaaataaaagaagcagaaacatcactcttgggtggaaaagctccttcacgccattcatcaagtggagacacgtttagcttaaaaacagctcattctcctaatgttttccttcagcaaggacaaaggtaa

SEQ ID NO: 443 - DNA, 699 bp, Homo sapiens
  source 1..699: mol_type = genomic DNA
atgccaagccaacagaagaaaatcattttttgcatggccggagtgttcagttttgcatgtgccctcggagttgtgacagccttggggacaccgttgtggatcaaagccactgtcctctgcaaaacgggagctctgctcgtcaatgcctcagggcaggagctggacaagtttatgggtgaaatgcagtacgggcttttccacggagagggtgtgaggcagtgtgggttgggagcaaggccctttcggttctcattttttccagatttgctcaaagcaatcccagtgagcatccacgtcaatgtcattctcttctctgccatccttattgtgttaaccatggtggggacagccttcttcatgtacaatgcttttggaaaaccttttgaaactctgcatggtcccctagggctgtaccttttgagcttcatttcaggctcctgtggctgtcttgtcatgatattgtttgcctctgaagtgaaaatccatcacctctcagaaaaaattgcaaattataaagaagggacttatgtctacaaaacgcaaagtgaaaaatataccacctcattctgggtcattttcttttgcttttttgttcattttctgaatgggctcctaatacgacttgctggatttcagttcccttttgcaaaatctaaagacgcagaaacaactaatgtagctgcagatctaatgtactga

SEQ ID NO: 444 - DNA, 2316 bp, Homo sapiens
  source 1..2316: mol_type = genomic DNA
atgagtggcttcttcacctcgctggacccccggcgggtgcagtggggagctgcctggtatgcaatgcactccaggatcctacgcaccaaaccagtggagtccatgctagagggaactgggaccaccacggcacatggaactaagctagcccaggtactcaccacagtggacctcatctctcttggcgttggcagctgtgtgggcactggcatgtatgtggtctctggcctggtggccaaggaaatggcaggacctggtgtcattgtgtccttcatcattgcagccgtcgcatccatattatcaggcgtctgctatgcagagtttggagttcgagtccccaagaccacaggatctgcctacacctacagctatgtcactgttggggaatttgtggcatttttcattggctggaacctgatcctggagtacctgattggcactgcggccggagccagtgctctgagcagcatgtttgactcactagccaaccacaccatcagccgctggatggcggacagcgtgggaaccctcaatggcctggggaaaggtgaagaatcatacccagaccttctggctctgttgatcgcggtcatcgtgaccatcattgttgctctgggggtgaagaattccataggcttcaacaatgttctcaatgtgctgaacctggcagtatgggtgttcatcatgatcgcaggcctcttcttcatcaatgggaaatactgggcggagggccagttcttgccccacggctggtcaggggtgctgcaaggagcagcaacatgcttctacgctttcattggctttgacatcatcgccaccactggagaggaagccaagaatcccaacacgtccatcccttatgctatcactgcctccctggtcatctgcctgacagcatatgtgtctgtgagcgtgatcttaactctgatggtgccatattataccattgacacggaatccccactcatggagatgtttgtggctcatgggttctatgctgccaaattcgtagtggccattgggtcggttgcaggactgacagtcagcttgctggggtccctcttcccgatgccgagggtcatttatgccatggctggtgacgggctccttttcaggttcctggctcacgtcagctcctacacagagacaccagtggtggcctgcatcgtgtcggggttcctggcagcgctcctcgcactgttggtcagcttgagagacctgatagagatgatgtctatcggcacgctcctggcctacaccttggtctctgtctgtgtcttgctccttcgataccaacctgagagtgacattgatggttttgtcaagttcttgtctgaggagcacaccaagaagaaggagggcattctggctgactgtgagaaggaagcttgttctcctgtgagtgagggggatgagttttctggcccagccaccaacacatgtggggccaagaacttaccatccttgggagacaatgagatgctcatagggaaatcagacaagtcaacctacaacgtcaaccaccccaattacggcaccgtggacatgaccacaggcatagaagctgatgaatccgaaaatatttatctcatcaagttaaagaagctgattgggcctcattattacaccatgagaatccggctgggccttccaggcaaaatggaccggcccacagcagcgacggggcacacggtgaccatctgcgtgctcctgctcttcatcctcatgttcatcttctgctccttcatcatctttggttctgactacatctcagagcagagctggtgggccatccttctggttgttctgatggtgctgctgatcagcaccctggtgtttgtgatcctgcagcagccagagaaccccaagaagctgccctacatggccccttgcctcccctttgtgcctgcctttgccatgctggtgaacatctatctcatgctaaagctctccaccatcacatggatccggtttgcggtctggtgctttgtgggtctgctcatttattttggatatggcatctggaacagcaccctggaaatcagcgctcgagaagaggccctgcaccaaagcacgtaccaacgctacgacgtggatgaccccttctcagtggaggagggtttctcctacgccacagagggcgagagccaggaggactggggcgggcccactgaagacaaaggcttctattaccaacagatgtcagatgcgaaggcaaacggccggacaagtagcaaagcgaagagcaaaagcaaacacaaacagaactcagaggccctgattgcaaatgatgagttagattactctccagagtag

SEQ ID NO: 445 - DNA, 1104 bp, Homo sapiens
  source 1..1104: mol_type = genomic DNA
atggatgcacagtgttcagccaaggtcaatgcaaggaagaggagaaaagaggcgcccggacccaacggggcaacagaagaagatggggttccttccaaagtgcagcgctgtgcagtgggcttacggcaaccagctcctttttctgatgaaattgaagttgactttagtaagccctatgtcagggtaactatggaagaagccagcagaggaactccttgtgagcgacctgtgagagtttatgccgatggaatatttgacttatttcactctggtcacgcccgagctctgatgcaagcgaagaaccttttccctaatacgtacctcattgtgggagtttgcagtgatgagctcacacacaacttcaaaggcttcacggtgatgaacgagaatgagcgctatgacgcagtccagcactgccgctacgtggatgaggtggtgaggaatgcgccctggacgctgacacccgagttcctggccgaacaccggattgattttgtagcccatgatgatattccttattcatctgctggcagtgatgatgtttataagcacatcaaggaggcaggcatgtttgctccaacacagaggacagaaggtatctccacatcagacatcatcacccgaattgtgcgggattatgatgtgtatgcgaggcggaacctgcagaggggctacacagcaaaggagctcaatgtcagctttatcaacgagaagaaataccacttgcaggagagggttgacaaagtaaagaagaaagtgaaagatgtggaggaaaagtcaaaagaatttgttcagaaggtggaggaaaaaagcattgacctcattcagaagtgggaggagaagtcccgagaattcattggaagttttctggaaatgtttggtccggaaggagcactgaaacatatgctgaaagaggggaagggccggatgctgcaggccatcagcccgaagcagagccccagcagcagccctactcgcgagcgctccccctccccctctttccgatggcccttctccggcaagacttccccaccttgctccccagcaaatctctccaggcacaaggctgcagcctatgatatcagtgaggatgaagaagactaa

SEQ ID NO: 446 - DNA, 492 bp, Homo sapiens
  source 1..492: mol_type = genomic DNA
atgatgtgcactgccaagaaatgtgggattaggtttcagcctccagctattatcttaatctatgagagtgaaatcaaggggaaaattcgccagcgcattatgccagttcgaaacttttcaaagttttcagattgcaccagagctgctgaacaattaaagaataatccgcgacacaagagttacctagaacaagtatccctgaggcagctagagaagctattcagttttttacgaggttacttgtcggggcagagtctggcagaaacaatggaacaaattcaacgggaaacaaccattgatcctgaggaagacctgaacaaactagatgacaaggagcttgccaaaagaaagagcatcatggatgaactttttgagaaaaatcagaagaagaaggatgatccaaattttgtttatgacattgaggttgaatttccacaggacgatcaactgcagtcctgtggctgggacacagagtcagctgatgagttctga

SEQ ID NO: 447 - DNA, 2565 bp, Homo sapiens
  source 1..2565: mol_type = genomic DNA
atgagcctcagtgaggagcaggcccggagctttctggaccagaaccccgattttgcccgccagtactttgggaagaaactgagccctgagaatgtggccgcggcctgcgaggacgggtgcccgccggactgcgacagcctccgggacctctgccaggtggaggagagcacggcgctgctggagctggtgcaggatatgcaggagagcatcaacatggagcgcgtggtcttcaaggtcctgcggcgcctctgcaccctcctgcaggccgaccgctgcagcctcttcatgtaccgccagcgcaacggcgtggccgagctggccaccaggcttttcagcgtgcagccggacagcgtcctggaggactgcctggtgccccccgactccgagatcgtcttcccactggacatcggggtcgtgggccacgtggctcagaccaaaaagatggtgaacgtcgaggacgtggccgagtgccctcacttcagctcatttgctgacgagctcactgactacaagacaaagaatatgctggccacacccatcatgaatggcaaagacgtcgtggcggtgatcatggcagtgaacaagctcaacggcccattcttcaccagcgaagacgaagatgtgttcttgaagtacctgaattttgccacgttgtacctgaagatctatcacctgagctacctccacaactgcgagacgcgccgcggccaggtgctgctgtggtcggccaacaaggtgtttgaggagctgacggacatcgagaggcagttccacaaggccttctacacggtgcgggcctacctcaactgcgagcggtactccgtgggcctcctggacatgaccaaggagaaggaattttttgacgtgtggtctgtgctgatgggagagtcccagccgtactcgggcccacgcacgcctgatggccgggaaattgtcttctacaaagtgatcgactacgtcctccacggcaaggaggagatcaaggtcattcccacaccctcagccgatcactgggccctggccagcggccttccaagctacgtggcagaaagcggctttatttgtaacatcatgaatgcttccgctgacgaaatgttcaaatttcaggaaggggccctggacgactccgggtggctcatcaagaatgtgctgtccatgcccatcgtcaacaagaaggaggagattgtgggagtcgccacattttacaacaggaaagacgggaagccctttgacgaacaggacgaggttctcatggagtccctgacacagttcctgggctggtcagtgatgaacaccgacacctacgacaagatgaacaagctggagaaccgcaaggacatcgcacaggacatggtcctttaccacgtgaagtgcgacagggacgagatccagctcatcctgccaaccagagcgcgcctggggaaggagcctgctgactgcgatgaggacgagctgggcgaaatcctgaaggaggagctgccagggcccaccacatttgacatctacgaattccacttctctgacctggagtgcaccgaactggacctggtcaaatgtggcatccagatgtactacgagctgggcgtggtccgaaagttccagatcccccaggaggtcctggtgcggttcctgttctccatcagcaaagggtaccggagaatcacctaccacaactggcgccacggcttcaacgtggcccagacgatgttcacgctgctcatgaccggcaaactgaagagctactacacggacctggaggccttcgccatggtgacagccggcctgtgccatgacatcgaccaccgcggcaccaacaacctgtaccagatgaagtcccagaaccccttggctaagctccacggctcctcgattttggagcggcaccacctggagtttgggaagttcctgctctcggaggagaccctgaacatctaccagaacctgaaccggcggcagcacgagcacgtgatccacctgatggacatcgccatcatcgccacggacctggccctgtacttcaagaagagagcgatgtttcagaagatcgtggatgagtccaagaactaccaggacaagaagagctgggtggagtacctgtccctggagacgacccggaaggagatcgtcatggccatgatgatgacagcctgcgacctgtctgccatcaccaagccctgggaagtccagagcaaggtcgcacttctcgtggctgctgagttctgggagcaaggtgacttggaaaggacagtcttggatcagcagcccattcctatgatggaccggaacaaggcggccgagctccccaagctgcaagtgggcttcatcgacttcgtgtgcacattcgtgtacaaggagttctctcgtttccacgaagagatcctgcccatgttcgaccgactgcagaacaataggaaagagtggaaggcgctggctgatgagtatgaggccaaagtgaaggctctggaggagaaggaggaggaggagagggtggcagccaagaaagtaggcacagaaatttgcaatggcggcccagcacccaagtcttcaacctgctgtatcctgtga

SEQ ID NO: 448 - DNA, 2673 bp, Homo sapiens
  source 1..2673: mol_type = genomic DNA
atggactccaacactgctccgctgggcccctcctgcccacagcccccgccagcaccgcagccccaggcgcgttcccgactcaatgccacagcctcgttggagcaggagaggagcgaaaggccccgagcacccggaccccaggctggccctggccctggtgttagagacgcagcggcccccgctgaaccccaggcccagcataccaggagccgggaaagagcagacggcaccgggcctacaaagggagacatggaaatcccctttgaagaagtcctggagagggccaaggccggggaccccaaggcacagactgaggtggggaagcactacctgcagttggccggcgacacggatgaagaactcaacagctgcaccgctgtggactggctggtcctcgccgcgaagcagggccgtcgcgaggctgtgaagctgcttcgccggtgcttggcggacagaagaggcatcacgtccgagaacgaacgggaggtgaggcagctctcctccgagaccgacctggagagggccgtgcgcaaggcagccctggtcatgtactggaagctcaaccccaagaagaagaagcaggtggccgtggcggagctgctggagaatgtcggccaggtcaacgagcacgatggaggggcgcagccaggccccgtgcccaagtccctgcagaagcagaggcgcatgctggagcgcctggtcagcagcgagtccaagaactacatcgcgctggatgactttgtggagatcactaagaagtacgccaagggcgtcatccccagcagcctgttcctgcaggacgacgaagatgatgacgagctggcggggaagagccctgaggacctgccactgcgtctgaaggtggtcaagtaccccctgcacgccatcatggagatcaaggagtacctgattgacatggcctccagggcaggcatgcactggctgtccaccatcatccccacgcaccacatcaacgcgctcatcttcttcttcatcgtcagcaacctcaccatcgacttcttcgccttcttcatcccgctggtcatcttctacctgtccttcatctccatggtgatctgcaccctcaaggtgttccaggacagcaaggcctgggagaacttccgcaccctcaccgacctgctgctgcgcttcgagcccaacctggatgtggagcaggccgaggtcaacttcggctggaaccacctggagccctatgcccatttcctgctctctgtcttcttcgtcatcttctccttccccatcgccagcaaggactgcatcccctgctcggagctggctgtcatcaccggcttctttaccgtgaccagctacctgagcctgagcacccatgcagagccctacacgcgcagggccctggccaccgaggtcaccgccggcctgctatcgctgctgccctccatgcccttgaattggccctacctgaaggtccttggccagaccttcatcaccgtgcctgtcggccacctggtcgtcctcaacgtcagcgtcccgtgcctgctctatgtctacctgctctatctcttcttccgcatggcacagctgaggaatttcaagggcacctactgctaccttgtgccctacctggtgtgcttcatgtggtgtgagctctccgtggtcatcctgctggagtccaccggcctggggctgctccgcgcctccatcggctacttcctcttcctctttgccctccccatcctggtggccggcctggccctggtgggcgtgctgcagttcgcccggtggttcacgtctctggagctcaccaagatcgcagtcaccgtggcggtctgtagtgtgcccctgctgttgcgctggtggaccaaggccagcttctctgtggtggggatggtgaagtccctgacgcggagctccatggtcaagctcatcctggtgtggctcacggccatcgtgctgttctgctggttctatgtgtaccgctcagagggcatgaaggtctacaactccacactgacctggcagcagtatggtgcgctgtgcgggccacgcgcctggaaggagaccaacatggcgcgcacccagatcctctgcagccacctggagggccacagggtcacgtggaccggccgcttcaagtacgtccgcgtgactgacatcgacaacagcgccgagtctgccatcaacatgctcccgttcttcatcggcgactggatgcgctgcctctacggcgaggcctaccctgcctgcagccctggcaacacctccacggccgaggaggagctctgtcgccttaagctgctggccaagcacccctgccacatcaagaagttcgaccgctacaagtttgagattaccgtgggcatgccattcagcagcggcgctgacggctcgcgcagccgcgaggaggacgacgtcaccaaggacatcgtgctgcgggccagcagcgagttcaagagcgtgctgctcagcctgcgccagggcagcctcatcgagttcagcaccatcctggagggccgcctgggcagcaagtggcctgtcttcgagctcaaggccatcagctgcctcaactgcatggcccagctctcacccaccaggcggcacgtgaagatcgagcacgactggcgcagcaccgtgcatggcgccgtgaagttcgccttcgacttctttttcttcccattcctgtcggcggcctga

SEQ ID NO: 449 - DNA, 1047 bp, Homo sapiens
  source 1..1047: mol_type = genomic DNA
atgcctgacgagctgacggagcccgggcgcgccacgccggcccgcgcctcctccttcctcatcgagaacctgctggcggccgaggccaagggcgcagggcgcgcgacccagggcgacggcagccgggaggacgaggaggaggacgacgacgaccccgaagacgaggacgccgagcaggcgcggcggcgacggctacagcggcggcgacagttgctcgcgggcaccgggcccggcggggaggcgcgggcccgtgcgctgctcgggccgggcgcgctgggcctcggtcctcggccgccccccggtcccgggccgcccttcgctctgggctgcggaggcgcagcgcgctggtacccacgggcgcacggtggctatggaggcggcctcagtcctgacaccagcgaccgggactcaccggagacgggcgaggagatgggccgtgcggagggcgcctggccgcgaggccccgggccgggagcggtgcagcgggaggcagcggagctggcggcgcgtggcccggcggccggcacggaggaggcgtcggagctggccgaggtccctgcggcggctggggagacacgcggcggcgttggcgtgggcggcggccgaaagaagaagacgcgcacagtcttctcccgcagccaggtcttccagctggaatccaccttcgacctgaagcgctacctgagcagcgccgagcgcgccggcctggccgcctccctgcagctcaccgagacgcaggttaagatctggttccagaaccgccgcaacaagtggaagcggcagctggcagccgagctggaggcggccagcctgtccccgccgggagcgcagcgcctggtccgcgtgccggtgctctaccacgaaagccccccggccgcagccgccgctgggcccccggccaccctgcccttcccgctggcgcccgccgcgcccgcgccgcccccaccgctgctcggcttctccggggccctcgcctacccgctggccgccttcccggccgccgcctccgtgccctttctgcgggcgcagatgcctggcctggtgtga

SEQ ID NO: 450 - DNA, 666 bp, Homo sapiens
  source 1..666: mol_type = genomic DNA
atgtcggactctgaggaggagagccaggaccggcaactgaaaatcgtcgtgctgggggacggcgcctccgggaagacctccttaactacgtgttttgctcaagaaacttttgggaaacagtacaaacaaactataggactggatttctttttgagaaggataacattgccaggaaacttgaatgttacccttcaaatttgggatataggagggcagacaataggaggcaaaatgttggataaatatatctatggagcacagggagtcctcttggtatatgatattacaaattatcaaagctttgagaatttagaagattggtatactgtggtgaagaaagtgagcgaggagtcagaaactcagccactggttgccttggtaggcaataaaattgatttggagcatatgcgaacaataaaacctgaaaaacacttacggttttgccaggaaaatggttttagtagccactttgtctcagccaagacaggagactctgtcttcctgtgctttcagaaagttgctgctgaaatccttgggatcaaattaaacaaagcagaaatagaacagtcacagagggtggtgaaggcagatattgtaaactacaaccaggaacctatgtcaaggactgttaaccctcctagaagctctatgtgtgcagttcagtga

SEQ ID NO: 451 - DNA, 4863 bp, Homo sapiens
  source 1..4863: mol_type = genomic DNA
atgaatcccagggaagaaaaagtaaaaataattacagaggagttcattgaaaatgatgaggatgcagacatgggaagacagaataagaactcaaaggttcgaagacagccaagaaagaaacagccaccaactgctgtccccaaggaaatggtgtccgaaaaatcccaccttggcaacccccaggagcctgtgcaggaggagcccaagacccgcctcctgagtatgacagtccggagaggcccacggagcttacctccaattccttcaacttccagaacaggctttgcagaattttccatgaggggacgcatgagggagaaattgcaagcagcgaggtccaaagcagaaagtgcattgctgcaggaaatccccactcctcggcccagacgcttacgaagtcccagtaagaaagaattggagactgaatttggcacagagccagggaaagaggtagaaaggactcaacaagaagttgactcccaaagttactcaagagtcaagttccatgattctgcacgaaaaatcaagcctaaaccccaggttccacctggcttcccttctgcagaagaggcctataacttctttactttcaactttgatcccgaaccagaaggatcagaggaaaaaccaaaagcaagacatagagcgggaactaatcaagaggaggaggaaggggaagaagaagaaccacctgcacaaggaggaggaaaggaaatggatgaggaagaactgcttaatggtgatgatgccgaggacttcctattgggcttagatcacgtggctgacgattttgtagcagtcagacctgcagattatgaaagcatccatgatcggctgcagatggaaagagaaatgctcttcatacccagtaggcagacagtccctacatataaaaagcttcctgagaatgtacagcccaggttcctggaagatgaaggcctttacaccggggtaagaccagaggtggcacgcaccaatcagaacatcatggagaacagattgctgatgcaggaccccgaaagaagatggtttggagatgacggcaggatcctagctctgccaaaccccatcaagccatttccttcaaggccgccagtactaacacaggagcagagcattaaggcagagcttgaaacactgtataaaaaggctgtaaaatacgttcacagtagtcagcatgtgatcagatctggagaccctcctggaaatttccaactggacattgatatttcagggttaatcttcactcatcatccctgttttagccgagagcatgttttggcagccaagctggcccagttatatgaccagtaccttgcaagacaccagagaaacaaggcgaaatttcttactgataagctccaagctttaagaaatgctgttcagactggccttgatccagaaaaacctcatcagtctctcgataccatccaaaaaaccatcaatgagtataaatctgaaattcgacaaacaagaaaattccgtgatgctgaacaagaaaaagatagaacattgcttaagactatcataaaagtttggaaagagatgaaatcccttcgagagttccagagatttacaaatactcccttgaaacttgttttgagaaaggaaaaagctgaccagaaagcagatgaagaagcatatgaagcagaaattcaagctgaaataagtgaactgttagaagagcacacggaggagtacgcacagaagatggaagaatacagaacgtcgttacaacagtggaaggcctggaggaaagtgcaaagggccaagaagaagaaaaggaaacaagcagcagaagaacatcccggtgatgagattgcagagccgtatcccgaggaggaccttgtgaagcccagccctccagagcccactgatcgggcagtgatagagcaggaggtgagggagagagcagcccagagcaggaggaggccttgggagcccacgctggtcccggagctaagcctggcaggaagcgtaacacccaatgaccagtgccccagagcggaggtctcgagaagggaggatgtaaagaagcgctcagtgtacttaaaagtgctgttcaacaacaaggaggtgtccaggacagtcagtcggccactaggagcagacttccgagttcactttgggcagattttcaatttgcaaatagtcaactggccggagagtttaacacttcaggtctatgaaactgtcggacacagtagtcccaccttgctagcagaagtgtttctgcctattcctgagactactgttgtcactggaagggctcctactgaagaagtggagtttagcagtaatcagcatgtgacactggaccacgagggagttggaagtggagtgcccttctcatttgaagctgatggcagtaaccagctgactctgatgacctcagggaaagtgtctcatagtgtggcatgggccattggagaaaacgggatacctttaattcctccattgtcacagcagaacatcggatttcggagtgctttgaagaaagcagatgccatctcatctattggcacatcaggactgacagacatgaaaaaattggccaagtgggcagcagagtccaagctcgacccaaatgaccccaacaatgcccctttgatgcagcttatctcggttgctaccagtggtgaatcctatgtccctgatttctttagactggagcagctgcaacaggagtttaactttgtttcagatcaagaattaaatagatccaaacgatttaggcttcttcatcttagaagccaagaggtgccagaattccgaaattataagcaagttccagtctatgaccgagaaattatggaaaaggtattccaggactatgagaaacggttacgagacagaaatgtaatagaaaccaaggaacacatagacacccatagggccatagtagccaagtacctccagcaggttagagaatcagtgataaatcgtttcttaattgcaaaacaatattttcttcttgctgatatgatagtagaagaagaagttcccaatatcagcattttgggcctaagccttttcaagctggcagaacaaaagcgaccactgcggccaaggagaaaaggtcggaagaaggtgacagcccaaaacctgtctgatggagacataaagctgctggtgaacattgtgcgagcttacgacattccagtgaggaagccggcagtgagcaaattccagcagccgtcgaggtcttcaaggatgttcagtgaaaagcatgctgcttccccaagcacgtacagcccaacccacaatgctgactaccccctcggccaggttttagtacgtccctttgtagaagtctcttttcaacgaacagtttgccatacgactacggctgaaggaccaaaccctagctggaatgaagaactagaacttccatttagggctcctaatggagattatagcacagccagtctgcagtcagtgaaagatgttgtgttcattaacatttttgatgaagtactgcatgatgtcttagaggatgaccgtgaaagaggaagtggaatccatactcgtattgagagacactggctgggatgtgtgaaaatgccatttagcacaatatatttccaagcaaggattgatggaacatttaaaatagatattcccccagttcttctgggctacagtaaggagcgaaatatgattcttgagcggggttttgattctgtccgaagcttaagtgaaggctcctacattaccctctttattaccattgagccccagctggttcctggagagtccattcgagaaaagtttgagtctcaggaagatgagaaattacttcaagcaactgagaagtttcaagctgaatgtgccttaaagtttccaaatcgtcagtgccttacaacagtaattgatataagcggaaaaactgtttttatcacacgttatctcaaacctttaaaccctcctcaggagctccttaatgtctaccccaataatctacaggcaactgcagaactggtggctcgatatgtgtccttgattcccttcttgcctgacactgtctcatttggtggtatctgtgacctctggagcacatctgatcaatttcttgatctcctggcaggggatgaagaagaacatgcagtactattgtgtaattactttctgtctctgggtaagaaggcctggctgttgatgggcaatgctattcctgagggtccaactgcctatgtgctaacttgggagcaaggtcgttatttaatatggaatccctgcagtggacatttttatggacaatttgatacattctgtcccttgaaaaatgtgggctgtttaataggtcctgacaatatttggtttaatattcaacgatatgaatctccactaaggataaattttgatgtcaccaggcccaagctatggaaatctttcttttcaagaagccttccatatcctggcctttccagtgttcagcctgaagagctaatttaccagcgctcagacaaagcagctgcagctgagctacaagacaggattgaaaaaatactaaaagaaaaaatcatggactggaggccacgccatctgactcggtggaataggtattgtacctctactctgcgtcacttcttgcctctgttagaaaaaagtcaaggagaagatgtagaagatgaccacagagcagaactgctaaaacagctgggagactacaggttctctggatttcctcttcacatgccttattctgaagtgaagcctttaattgacgctgtgtatagtactggagtacataatattgatgttcctaatgttgaatttgctttagctgtatacatacacccataccccaaaaatgttttgtctgtttggatctatgttgcctctcttatacgcaacaggtaa

SEQ ID NO: 452 - DNA, 2598 bp, Homo sapiens
  source 1..2598: mol_type = genomic DNA
atggccctcgtactcggctccctgttgctgctggggctgtgcgggaactccttttcaggagggcagccttcatccacagatgctcctaaggcttggaattatgaattgcctgcaacaaattatgagacccaagactcccataaagctggacccattggcattctctttgaactagtgcatatctttctctatgtggtacagccgcgtgatttcccagaagatactttgagaaaattcttacagaaggcatatgaatccaaaattgattatgacaagccagaaactgtaatcttaggtctaaagattgtctactatgaagcagggattattctatgctgtgtcctggggctgctgtttattattctgatgcctctggtggggtatttcttttgtatgtgtcgttgctgtaacaaatgtggtggagaaatgcaccagcgacagaaggaaaatgggcccttcctgaggaaatgctttgcaatctccctgttggtgatttgtataataataagcattggcatcttctatggttttgtggcaaatcaccaggtaagaacccggatcaaaaggagtcggaaactggcagatagcaatttcaaggacttgcgaactctcttgaatgaaactccagagcaaatcaaatatatattggcccagtacaacactaccaaggacaaggcgttcacagatctgaacagtatcaattcagtgctaggaggcggaattcttgaccgactgagacccaacatcatccctgttcttgatgagattaagtccatggcaacagcgatcaaggagaccaaagaggcgttggagaacatgaacagcaccttgaagagcttgcaccaacaaagtacacagcttagcagcagtctgaccagcgtgaaaactagcctgcggtcatctctcaatgaccctctgtgcttggtgcatccatcaagtgaaacctgcaacagcatcagattgtctctaagccagctgaatagcaaccctgaactgaggcagcttccacccgtggatgcagaacttgacaacgttaataacgttcttaggacagatttggatggcctggtccaacagggctatcaatcccttaatgatatacctgacagagtacaacgccaaaccacgactgtcgtagcaggtatcaaaagggtcttgaattccattggttcagatatcgacaatgtaactcagcgtcttcctattcaggatatactctcagcattctctgtttatgttaataacactgaaagttacatccacagaaatttacctacattggaagagtatgattcatactggtggctgggtggcctggtcatctgctctctgctgaccctcatcgtgattttttactacctgggcttactgtgtggcgtgtgcggctatgacaggcatgccaccccgaccacccgaggctgtgtctccaacaccggaggcgtcttcctcatggttggagttggattaagtttcctcttttgctggatattgatgatcattgtggttcttacctttgtctttggtgcaaatgtggaaaaactgatctgtgaaccttacacgagcaaggaattattccgggttttggatacaccctacttactaaatgaagactgggaatactatctctctgggaagctatttaataaatcaaaaatgaagctcacttttgaacaagtttacagtgactgcaaaaaaaatagaggcacttacggcactcttcacctgcagaacagcttcaatatcagtgaacatctcaacattaatgagcatactggaagcataagcagtgaattggaaagtctgaaggtaaatcttaatatctttctgttgggtgcagcaggaagaaaaaaccttcaggattttgctgcttgtggaatagacagaatgaattatgacagctacttggctcagactggtaaatcccccgcaggagtgaatcttttatcatttgcatatgatctagaagcaaaagcaaacagtttgcccccaggaaatttgaggaactccctgaaaagagatgcacaaactattaaaacaattcaccagcaacgagtccttcctatagaacaatcactgagcactctataccaaagcgtcaagatacttcaacgcacagggaatggattgttggagagagtaactaggattctagcttctctggattttgctcagaacttcatcacaaacaatacttcctctgttattattgaggaaactaagaagtatgggagaacaataataggatattttgaacattatctgcagtggatcgagttctctatcagtgagaaagtggcatcgtgcaaacctgtggccaccgctctagatactgctgttgatgtctttctgtgtagctacattatcgaccccttgaatttgttttggtttggcataggaaaagctactgtatttttacttccggctctaatttttgcggtaaaactggctaagtactatcgtcgaatggattcggaggacgtgtacgatgatgttgaaactatacccatgaaaaatatggaaaatggtaataatggttatcataaagatcatgtatatggtattcacaatcctgttatgacaagcccatcacaacattga

SEQ ID NO: 453 - DNA, 3966 bp, Homo sapiens
  source 1..3966: mol_type = genomic DNA
atggagccacccggacgccggcggggccgcgcgcagccgccgctgttgctgccgctctcgctgttagcgctgctcgcgctgctgggaggcggcggcggcggcggcgccgcggcgctgcccgccggctgcaagcacgatgggcggccccgaggggctggcagggcggcgggcgccgccgagggcaaggtggtgtgcagcagcctggaactcgcgcaggtcctgcccccagatactctgcccaaccgcacggtcaccctgattctgagtaacaataagatatccgagctgaagaatggctcattttctgggttaagtctccttgaaagattggacctccgaaacaatcttattagtagtatagatccaggtgccttctggggactgtcatctctaaaaagattggatctgacaaacaatcgaataggatgtctgaatgcagacatatttcgaggactcaccaatctggttcggctaaacctttcggggaatttgttttcttcattatctcaaggaacttttgattatcttgcgtcattacggtctttggaattccagactgagtatcttttgtgtgactgtaacatactgtggatgcatcgctgggtaaaggagaagaacatcacggtacgggataccaggtgtgtttatcctaagtcactgcaggcccaaccagtcacaggcgtgaagcaggagctgttgacatgcgaccctccgcttgaattgccgtctttctacatgactccatctcatcgccaagttgtgtttgaaggagacagccttcctttccagtgcatggcttcatatattgatcaggacatgcaagtgttgtggtatcaggatgggagaatagttgaaaccgatgaatcgcaaggtatttttgttgaaaagaacatgattcacaactgctccttgattgcaagtgccctaaccatttctaatattcaggctggatctactggaaattggggctgtcatgtccagaccaaacgtgggaataatacgaggactgtggatattgtggtattagagagttctgcacagtactgtcctccagagagggtggtaaacaacaaaggtgacttcagatggcccagaacattggcaggcattactgcatatctgcagtgtacgcggaacacccatggcagtgggatatatcccggaaacccacaggatgagagaaaagcttggcgcagatgtgatagaggtggcttttgggcagatgatgattattctcgctgtcagtatgcaaatgatgtcactagagttctttatatgtttaatcagatgcccctcaatcttaccaatgccgtggcaacagctcgacagttactggcttacactgtggaagcagccaacttttctgacaaaatggatgttatatttgtggcagaaatgattgaaaaatttggaagatttaccaaggaggaaaaatcaaaagagctaggtgacgtgatggttgacattgcaagtaacatcatgttggctgatgaacgtgtcctgtggctggcgcagagggaagctaaagcctgcagtaggattgtgcagtgtcttcagcgcattgctacctaccggctagccggtggagctcacgtttattcaacatattcacccaatattgctctggaagcttatgtcatcaagtctactggcttcacggggatgacctgtaccgtgttccagaaagtggcagcctctgatcgtacaggactttcggattatgggaggcgggatccagagggaaacctggataagcagctgagctttaagtgcaatgtttcaaatacattttcgagtctggcactaaagaatactattgtggaggcttctattcagcttcctccttcccttttctcaccaaagcaaaaaagagaactcagaccaactgatgactctctttacaagcttcaactcattgcattccgcaatggaaagctttttccagccactggaaattcaacaaatttggctgatgatggaaaacgacgtactgtggttacccctgtgattctcaccaaaatagatggtgtgaatgtagatacccaccacatccctgttaatgtgacactgcgtcgaattgcacatggagcagatgctgttgcagcccggtgggatttcgatttgctgaacggacaaggaggctggaagtcagatgggtgccatatactctattcagatgaaaatatcactacgattcagtgctactcccttagtaactatgcagttttaatggatttgacgggatctgaactatacacccaggcggccagcctcctgcatcctgtggtttatactaccgctatcattctcctcttatgtctcttagccgtcattgtcagttacatataccatcacagtttgattagaatcagcctcaagagctggcacatgcttgtgaacttgtgctttcatattttcctaacctgtgtggtctttgtgggaggaataacccagactaggaatgccagcatctgccaagcagttgggataattcttcactattccacccttgccacagtactatgggtaggagtgacagctcgaaatatctacaaacaagtcactaaaaaagctaaaagatgccaggatcctgatgaaccaccacctccaccaagaccaatgctcagattttacctgattggtggtggtatccccatcattgtttgcggcataactgcagcagcgaacattaagaattacggcagtcggccaaacgcaccctattgctggatggcatgggaaccctccttgggagccttctatgggccagccagcttcatcacttttgtaaactgcatgtactttctgagcatatttattcagttgaaaagacaccctgagcgcaaatatgagcttaaggagcccacggaggagcaacagagattggcagccaatgaaaatggcgaaataaatcatcaggattcaatgtctttgtctctgatttctacatcagccttggaaaatgagcacacttttcattctcagctcttgggggccagccttactttgctcttatatgttgcactgtggatgtttggggctttggctgtttctttgtattaccctttggacttggtttttagcttcgtttttggagccacaagtttaagcttcagtgcgttcttcgtggtccaccattgtgttaatagggaggatgttagacttgcgtggatcatgacttgctgcccaggacggagctcgtattcagtgcaagtcaacgtccagccccccaactctaatgggacgaatggagaggcacccaaatgccccaatagcagtgcggagtcttcatgcacaaacaaaagtgcttcaagcttcaaaaattcctcccagggctgcaaattaacaaacttgcaggcggctgcagctcagtgccatgccaattctttacctttgaactccacccctcagcttgataatagtctgacagaacattcaatggacaatgatattaaaatgcacgtggcgcctttagaagttcagtttcgaacaaatgtgcactcaagccgccaccataaaaacagaagtaaaggacaccgggcaagccgactcacagtcctgagagaatatgcctacgatgtcccaacgagcgtggaaggaagcgtgcagaacggcttacctaaaagccggctgggcaataacgaaggacactcgaggagccgaagagcttatttagcctacagagagagacagtacaacccaccccagcaagacagcagcgatgcttgtagcacacttcccaaaagtagcagaaattttgaaaagccagtttcaaccactagtaaaaaagatgcgttaaggaagccagctgtggttgaacttgaaaatcagcaaaaatcttatggcctcaacttggccattcagaatggaccaattaaaagcaatgggcaggagggacccttgctcggtaccgatagcactggcaatgttaggactggattatggaaacacgaaactactgtgtaa

SEQ ID NO: 454 - DNA, 2346 bp, Homo sapiens
  source 1..2346: mol_type = genomic DNA
atgcatgatgaatgtactccacagcagacaatgtcctccattcaagataccaaagcagcagacattgctgcaagaggggaactaaatgtcatagaaacagctactgtttctcccacaaatggagaggaaagtcattacacaaaccaggtccagttagaaaaaaataaaacacatatgagttcagcattagtggaaaaagaaaacaatacatcactgaatggacgtgtactggggcaagaagagtcacagaataaaatgttcccagataatgcagaaaatgaagatgataaacaaatagaacacatgactgttgagaacataaatggcaacagggaagagactcatggcataattcagacaacagagacagaaattcaagagacttcagaaagcccaagagaagagatgaccacatcctcaataatatgtgatatctccaagaaatatataaatagtactcttcccaatgattcagagaatataaagcacaagaataacataatggaaaaggagtatcttgatgtgctgagtgatgttactggcccccaagtgtcttgttatattacagcaccatcatatgttctacaacaactagaatgccggataataaatcacatgagttctttaatagtgggtgataatgaagagttagttagcaacgtcataactattgaatgctcagataaggaaaagagagttccatttccaataggcattgcaattccatttactgcacgttacagaggaaattacagagatatcatggtgaaagtgtgtgacataaaccttcaatcaagttacctaaacccaaattcactagaaggaatgaagggaggttataaggggacctgtgcttcagtaaaagtttacaaattgggtatcttttctgttgtgtcttgtttaaagaaagagtcgttcacagtaacaaagaaaggcctcgctcttaagtcaagcatggattcccgaatatccttaaattaccctccaggagtttttacctctccagtgctggtgcagttaaagatccaaccagttgacccagctctggtggcacatttaaaagcacagcaagatactttctactcagtccaatccacaagccctctgattcacattcagcacccatcaacttatccttttcagaagccagtcactttgtttttaccttgttctccataccttgataaaaacaaccttggttctgagatagatcataaaagaagagcaagtgccacaataaataggattacaccttcgtatttcaaccggacaaaaattgcctccataagaaaacctaggaaaaatgccagtgaatgtttgaaattactgggattcagaagccaagacagtggttggtgtgggcttgatgatgttgtgaaaaccatacagagcggcttggtatcagttgaattgtatgaacatttggagaggtttattgtacttcacctctcttccaccatggacaatagtcatttggttacttttgtgaaatctttagaggaagccatgctcagcaccactgcctgcatagtactgtctcaccagaaggacaatccacatagaatagctgttttagtggtgccttccaaagatttaagccaggtgcttaaggacctgcacttggaagggtttggaggacctccagagccatctcgtcatttccaagttcgagaaggagaacaacttcttttaagatttactggaaacatatttgcttcaagcaacgggaaggattatggaaaagactacacacttatttttcacttgcaaagaaaacctaggctggaactccaaatcaaagaagtggacgaatttggaaactatagttgccctcattacaaaggcaccattgtcgtttataaagtacctaaaggaaagatagtccccaacttgaatcaatctctcgtaattaatgaaaaccattctcagttgccaatttgcaaattaccattgaaattgccaaagcataagaaattaatcaaccgtccacagagtaccaaaagagtttctaaggatcctgtagaagccctttgggataacttgctccattggctggctgaggagctctcagaagaaaatgctgagtctctttcctcaactctccctctgcgccgtagcaccattcagctcatcaaactcaagaaccctgatgatctcacagaacagatccacgagtttctttgcttctggaaaaaatcgcttccaactttcaccgacaaacttcgcctcctggctcgacatctccgcaagattggcaggagtgatcttgcagaagagctcaaattcaagtgggaaaataaagtgttcactgaaccacagcagtgttttgatgtagcccctgagtaa

SEQ ID NO: 455 - DNA, 4029 bp, Homo sapiens
  source 1..4029: mol_type = genomic DNA
atgaagcgtattttctcactgctagaaaagacttggcttggcgcaccaatacagtttgcctggcaaaaaacatcaggaaactaccttgcagtaacaggagctgattatattgtgaaaatctttgatcgccatggtcaaaaaagaagtgaaattaacttacctggtaactgtgttgccatggattgggataaagatggagatgtcctagcagtgattgctgagaaatctagctgcatttatctttgggatgccaacacaaataagaccagccagttagacaatggcatgagggatcaaatgtctttccttctttggtcaaaagttggaagtttcctggctgttggaactgttaaaggaaatttgcttatttataatcatcagacatctcgaaagattcctgtccttggaaaacatactaagagaatcacttgtggatgttggaatgcagaaaatctgcttgctttaggtggtgaagataaaatgattacagttagtaatcaggaaggtgacacgataagacagacacaagtgagatcagagcctagcaacatgcagtttttcttgatgaagatggatgaccgaacctctgctgctgaaagcatgataagtgtggtgcttggcaagaaaactttgttttttttaaatctgaatgaaccagataacccagctgatcttgaatttcagcaggactttggcaacattgtctgctataattggtatggtgatggccgcatcatgattggtttttcatgtggacattttgtggtcatttctactcatactggagagcttggtcaagagatatttcaggctcgtaaccataaagataatctaaccagcattgcagtatcacagactcttaacaaagttgctacatgtggagataactgcattaaaatccaagacttggttgacttaaaagacatgtatgttatactcaacctggatgaggaaaataaaggattgggtaccttgtcctggactgatgatggccagttgctagcactctctacccaaaggggctcacttcatgttttcctgaccaagcttcccatacttggggatgcctgcagcacaaggattgcctatctcacctccctccttgaagtcaccgtagccaaccctgttgaaggagagctaccaatcacagtttctgttgatgtggaacccaactttgtggcagtaggtctttatcatctggctgtaggaatgaataatcgagcttggttttatgtccttggagaaaatgctgtgaaaaaattgaaagatatggagtatctgggaacagtagccagtatttgccttcattctgactatgctgctgcactttttgaaggcaaagtccagttacatttgatagaaagcgaaatcttggatgctcaagaagaacgtgagactcggcttttcccagcagtggatgataagtgccgtatcttatgccatgccttaactagtgatttcctcatctatggtacagatactggtgtcgttcagtatttctacattgaagactggcaattcgttaatgattatcgacatcctgtcagtgtgaaaaagatttttcccgacccaaatgggaccagattagttttcattgatgaaaaaagtgatggatttgtttactgtccagtcaatgacgctacctatgagattccagatttttcaccaaccattaaaggtgttctttgggaaaactggccaatggataaaggtgtatttattgcttatgatgatgataaggtgtacacttatgtctttcacaaggacactatacaaggagccaaggttattttggctggtagcaccaaagttccttttgctcataaacctttgctgctatataatggagagctgacctgccaaacacagagtggaaaagtaaacaacatctaccttagcacccatggctttctcagcaacttaaaagatacggggcctgacgaactgagaccaatgctggcacagaatttaatgctaaagaggttttctgatgcttgggaaatgtgcaggattctgaatgatgaggctgcctggaatgagttggccagagcttgtctacatcacatggaagtggagtttgcaatccgtgtttatcggagaattggaaatgttggcatagtgatgtccttggaacaaataaagggaatagaggactacaatcttttggcaggacaccttgccatgtttaccaacgattataacctggctcaggacttgtaccttgcatccagctgtcctattgctgccctggagatgagaagggatttacagcattgggacagtgctctacaactggcaaagcatttggccccagaccagataccttttatatcaaaagaatatgctattcagcttgaattcgcgggtgattatgtaaatgctttggctcattatgagaaaggaataacaggtgataataaggaacatgatgaagcttgtctggctggagtggcccagatgtccataagaatgggagacatacgtcgaggggttaaccaagccctcaagcatcccagcagggtccttaaaagagactgtggagccatattggagaatatgaagcaattttcagaagcggcccaactgtatgaaaaaggtctctactacgataaagcagcatctgtttacatccgctctaagaattgggcaaaagttggtgatcttctgccccacgtttcttctcctaagatccatttgcagtatgccaaagccaaggaagcagatggaagatacaaagaagctgttgtagcttatgaaaatgcaaaacagtggcaaagtgtaatccgcatctatctggatcacctcaataatcctgaaaaagctgtcaatattgttagagagacccagtctctggatggagccaaaatggtagccaggttttttctacagcttggtgactatgggtctgccatccagtttcttgtcatgtccaaatgcaacaatgaagctttcacactggctcagcaacacaacaaaatggaaatctatgcagatattattggttctgaagacactactaatgaagactatcaaagcattgccttatactttgaaggagaaaagagatatcttcaggctggaaaattcttcttgctgtgtggccaatattcacgagcacttaaacacttcctgaaatgcccaagctcggaagataatgtggcaatagaaatggcaattgaaactgttggtcaggccaaagatgaactgctgaccaatcagctgatagaccatctcctgggggagaacgatggcatgcctaaggatgccaagtacctgttccgcttgtacatggctctgaagcaataccgagaagctgcccagactgccatcatcattgccagagaagagcagtctgcaggcaactaccggaatgcacacgatgttctcttcagtatgtatgcagaactgaaatcccagaagatcaaaattccctccgagatggccaccaacctcatgattctgcacagctatatactagtaaagattcatgttaaaaatggagatcacatgaaaggggctcgcatgctcattcgggtggccaacaacatcagcaaatttccatcacacattgtacccatcctgacgtcaactgtgattgagtgtcacagggcaggcctgaagaactctgctttcagcttcgcagctatgttgatgaggcctgaataccgcagcaaaatagatgccaaatacaaaaagaagatcgagggaatggtcaggagacccgatatatctgagatagaagaggccacgactccatgtccattctgcaaatttcttctcccagagtgtgaactcctctgtcctggatgtaaaaacagtatcccatattgcattgcaacaggtcgacacatgttgaaagatgactggacggtgtgtccacattgtgacttccctgctctatactcagaattgaagatcatgctaaacactgaaagcacatgtcctatgtgttcagaaagattaaacgctgctcagctgaaaaagatttcagactgtacccagtacctgcgaacggaggaggaactgtga

SEQ ID NO: 456 - DNA, 2061 bp, Homo sapiens
  source 1..2061: mol_type = genomic DNA
atgaagaacaatattatcaatacacagcagtcttttgtaaccatgcccaatgtgattgtaccagatattgaaaaggaaatacgaaggatggaaaatggagcatgcagctccttttctgaggatgatgacagtgcctctacatctgaagaatcagagaatgaaaaccctcatgcaaggggttcctttagttataagtcactcagaaagggaggaccatcacagagggagcagtacctgcctggtgccattgcactttttaatgtgaacaacagcagcaataaggaccaggaaccagaagaaaaaaagaaaaagaaaaaagaaaagaagagcaagtcagatgataaaaacgaaaataaaaacgacccagagaagaaaaagaagaaaaaggacaaagagaagaaaaagaaagaggagaaaagcaaagataagaaagaagaggagaagaaagaagttgtggttattgatccctcgggaaacacatattacaactggctgttttgcatcacattacctgttatgtacaactggacaatggttattgccagagcatgttttgatgaacttcaatctgattacctagaatattggctcattttggattacgtatcagacatagtctatttaatcgatatgtttgtacgaacaaggacaggttacctagaacaaggactgctggtaaaggaagaacttaaactcataaataaatataaatccaacttgcaatttaaacttgatgttctgtcactgataccaactgatttgctgtattttaagttagggtggaactatccagaaattagattaaacaggttgttacggttctctcgtatgtttgagttcttccagagaacagaaacaaggacaaactatccaaacatcttcaggatttccaaccttgttatgtatatcgtcatcattatccactggaatgcatgtgtgttctactctatttctaaagctattggatttggaaatgatacatgggtctaccctgatattaatgatcctgaatttggccgtttggctagaaaatacgtatacagcctttactggtctacactgactttgactaccattggtgaaacaccccctcccgtgagggattctgagtatgtctttgtggtggttgatttcctaattggagtgttaatttttgctaccatcgttggtaacataggttctatgatttccaacatgaatgcagccagagcagaatttcaagcaagaattgatgctatcaagcaatatatgcattttcgaaatgtaagcaaagatatggaaaagagggttattaaatggtttgactacctgtggaccaacaaaaaaacagttgatgagaaagaagtcttaaagtatctacctgataaactaagagcagaaattgccatcaacgttcacttagacacattaaaaaaggtacgcatttttgctgattgtgaagctggtctgttggtggagttggtcttgaaattgcaaccccaagtctacagtcctggagattatatttgcaagaaaggggatatcggacgagagatgtacattatcaaggaaggcaaactcgctgtggtggcagatgatggagtcactcagtttgtggtattgagcgatggcagctacttcggtgagatcagcattcttaacattaaagggagcaaagctggcaatcgaagaacggccaatattaaaagtattggctactcagacctgttctgtctctcaaaagatgacctcatggaagctctaactgagtacccagatgccaaaactatgctggaagagaaagggaagcagattttaatgaaagatggtctactggatctaaacattgcaaatgctggcagtgatcctaaagatcttgaagagaaggttactcgaatggaggggtcagtagacctcctgcaaaccaggtttgcccgaatcttggctgagtatgagtccatgcagcagaaactgaaacaaagattaaccaaggttgagaaatttctgaaaccgcttattgacacagaattttcaagtattgagggacctggagcggaaagtgggcccatcgactctacatag

SEQ ID NO: 457 - DNA, 408 bp, Homo sapiens
  source 1..408: mol_type = genomic DNA
atggtgctggagagcgtggcccgtatcgtgaaggtgcagctccctgcatatctgaagcggctcccagtccctgaaagcattaccgggttcgctaggctcacagtttcagaatggcttcggttattgcctttccttggtgtactcgcacttcttggctaccttgcagttcgtccattcctcccgaagaagaaacaacagaaggatagcttgattaatcttaaaatacaaaaggaaaatccgaaagtagtgaatgaaataaacattgaagatttgtgtcttactaaagcagcttattgtaggtgttggcgttctaaaacgtttcctgcctgcgatggttcacataataaacacaatgaattgacaggagataatgtgggtccactaatactgaagaagaaagaagtataa

SEQ ID NO: 458 - DNA, 2685 bp, Homo sapiens
  source 1..2685: mol_type = genomic DNA
atgattcttcttgctgtgctttttctctgcttcatttcctcatattcagcttctgttaaaggtcacacaactggtctctcattaaataatgaccggctgtacaagctcacgtactccactgaagttcttcttgatcggggcaaaggaaaactgcaagacagcgtgggctaccgcatttcctccaacgtggatgtggccttactatggaggaatcctgatggtgatgatgaccagttgatccaaataacgatgaaggatgtaaatgttgaaaatgtgaatcagcagagaggagagaagagcatcttcaaaggaaaaagcccatctaaaataatgggaaaggaaaacttggaagctctgcaaagacctacgctccttcatctaatccatggaaaggtcaaagagttctactcatatcaaaatgaggcagtggccatagaaaatatcaagagaggtctggctagcctatttcagacacagttaagctctggaaccaccaatgaggtagatatctctggaaattgtaaagtgacctaccaggctcatcaagacaaagtgatcaaaattaaggccttggattcatgcaaaatagcgaggtctggatttacgaccccaaatcaggtcttgggtgtcagttcaaaagctacatctgtcaccacctataagatagaagacagctttgttatagctgtgcttgctgaagaaacacacaattttggactgaatttcctacaaaccattaaggggaaaatagtatcgaagcagaaattagagctgaagacaaccgaagcaggcccaagattgatgtctggaaagcaggctgcagccataatcaaagcagttgattcaaagtacacggccattcccattgtggggcaggtcttccagagccactgtaaaggatgtccttctctctcggagctctggcggtccaccaggaaatacctgcagcctgacaacctttccaaggctgaggctgtcagaaacttcctggccttcattcagcacctcaggactgcgaagaaagaagagatccttcaaatactaaagatggaaaataaggaagtattacctcagctggtggatgctgtcacctctgctcagacctcagactcattagaagccattttggactttttggatttcaaaagtgacagcagcattatcctccaggagaggtttctctatgcctgtggatttgcttctcatcccaatgaagaactcctgagagccctcattagtaagttcaaaggttctattggtagcagtgacatcagagaaactgttatgatcatcactgggacacttgtcagaaagttgtgtcagaatgaaggctgcaaactcaaagcagtagtggaagctaagaagttaatcctgggaggacttgaaaaagcagagaaaaaagaggacaccaggatgtatctgctggctttgaagaatgccctgcttccagaaggcatcccaagtcttctgaagtatgcagaagcaggagaagggcccatcagccacctggctaccactgctctccagagatatgatctccctttcataactgatgaggtgaagaagaccttaaacagaatataccaccaaaaccgtaaagttcatgaaaagactgtgcgcactgctgcagctgctatcattttaaataacaatccatcctacatggacgtcaagaacatcctgctgtctattggggagcttccccaagaaatgaataaatacatgctcgccattgttcaagacatcctacgttttgaaatgcctgcaagcaaaattgtccgtcgagttctgaaggaaatggtcgctcacaattatgaccgtttctccaggagtggatcttcttctgcctacactggctacatagaacgtagtccccgttcggcatctacttacagcctagacattctctactcgggttctggcattctaaggagaagtaacctgaacatctttcagtacattgggaaggctggtcttcacggtagccaggtggttattgaagcccaaggactggaagccttaatcgcagccacccctgacgagggggaggagaaccttgactcctatgctggtatgtcagccatcctctttgatgttcagctcagacctgtcacctttttcaacggatacagtgatttgatgtccaaaatgctgtcagcatctggcgaccctatcagtgtggtgaaaggacttattctgctaatagatcattctcaggaacttcagttacaatctggactaaaagccaatatagaggtccagggtggtctagctattgatatttcaggtgcaatggagtttagcttgtggtatcgtgagtctaaaacccgagtgaaaaatagggtgactgtggtaataaccactgacatcacagtggactcctcttttgtgaaagctggcctggaaaccagtacagaaacagaagcaggcttggagtttatctccacagtgcagttttctcagtacccattcttagtttgcatgcagatggacaaggatgaagctccattcaggcaatttgagaaaaagtacgaaaggctgtccacaggcagaggttatgtctctcagaaaagaaaagaaagcgtattagcaggatgtgaattcccgctccatcaagagaactcagagatgtgcaaagtggtgtttgcccctcagccggatagtacttccagcggatggttttga

SEQ ID NO: 459 - DNA, 2040 bp, Homo sapiens
  source 1..2040: mol_type = genomic DNA
atgcatctctttgcatgtctgtgcattgtccttagctttttggaaggagtgggctgtttgtgtccttcacagtgcacctgtgattatcacggcagaaatgacggctcaggatcaaggttggtgctatgtaatgacatggatatgaacgagctgcctacgaacctccccgtggacactgtgaagcttcgcatagagaagactgtcatccgcagaatctctgcggaggccttctattacctggtggagctccagtatctctgggtgacttacaattccgtggccagcattgaccccagcagcttttacaacctgaagcaactgcatgagttgcgcttggatgggaattctctggctgctttcccttgggcatctctgctggacatgccccttctgaggaccctggacttgcacaataacaaaataaccagtgtgccaaatgaggcgctcaggtatctgaagaaccttgcctacttggatttatcaagcaacagactcaccacattgccaccagatttcctggagagctggactcatttagtttcaacaccttctggagtcctggacctttccccaagcaggattattcttggtctacaggacaatccttggttctgtgactgtcatatttccaaaatgattgagttgtcaaaggtcgttgaccctgctatagtgcttctggatccactgatgacttgcagtgaacctgagcgcctcacaggaattttgtttcagcgggctgaattggagcattgtctgaaaccatcagtgatgacctcagccaccaaaatcatgtctgctctgggcagtaatgttctactgcggtgtgatgccactggcttccccaccccacagatcacatggaccagatctgacagctcgccagttaattatacagtaatacaagaatctccagaggaaggagtcagatggtccataatgagcttgacaggcatttcttccaaagacgctggggattacaaatgtaaggccaaaaatctggctgggatgtcagaagctgtggttactgtgacagtgcttggcattaccacaactccaataccaccagacacttctgaaagaactggagatcatcctgagtgggatgtccagccgggatctggaagatctacatctgtatctagcgcatcatcatatctttggtcctcttccttctcccccacatcttctttttctgcttctactttgtctcctccctctactgcttccttctctttatctcctttctcctcctccactgtttcttcaaccacaactctgagcacaagcatctcagcaagtaccaccatggccaacaagcgatcattccagctccaccaaggtgggaaaagaaatttaaaggtggcaaagaatggaagtaagcttcctccagccagcacaagtaagaaagaagagctggcattgttggatcaaacaatgcttacggagacaaatgccgcaatagaaaacctcagggtggtcagtgagactaaagagagtgtgacattgacgtggaatatgatcaacaccacacataactctgcagtgactgtgttgtattccaagtatggtgggaaggacctgctgctgttgaatgcagactccagcaagaaccaagtaaccatagatggcttggaacccggtgggcaatacatggcctgtgtctgtccaaaaggagtgcctccccagaaagaccaatgcatcaccttttctactgaaagagttgaaggagatgattctcaatggtctctccttctcgtggtgaccagtactgcctgtgttgttatcttaccattgatttgtttcttgttgtacaaagtttgcaaactgcaatgtaaatcagaacctttttgggaagatgatttggcaaaggagacttatatccaatttgagaccctgtttcccaggtctcaaagtgtaggtgagctctggacacgaagccacagggatgactcagagaaattgctgctttgttctaggtcaagtgtggaatctcaggtgacttttaaaagtgaaggttccagaccagagtattattgctaa

SEQ ID NO: 460 - DNA, 2148 bp, Homo sapiens
  source 1..2148: mol_type = genomic DNA
atggatctgattttaaaccgaatggattatctgcaggtgggagtaacatctcagaagactatgaagctaattcctgcctcaagacacagagctacacaaaaggtggttattggagatcatgatggggtagttatgtgctttggcatgaagaaaggagaagcagcagcagtgttcaagactttacccgggccgaagattgcaaggctggaactgggaggggttatcaacacacctcaggagaaaatttttattgctgcagcatctgagattagaggcttcacaaaaagaggaaaacagttcctctcctttgaaacaaacctcactgaaagcattaaagctatgcacatatctggctcagacctctttctcagtgcaagttacatctataaccattattgtgactgcaaagaccaacattattacctttctggggataaaatcaatgatgtgatctgccttccagtggaaagattatctcgtatcacacctgtattggcctgccaggacagagtgctcagagttttacagggatctgatgtgatgtatgcagttgaagttcctggaccccctactgtcttagcactacacaatggaaatggcggtgactctggagaagaccttttgtttgggacatcagacggaaaacttgcgcttatacagattactacatccaaaccagtacgcaagtgggaaattcaaaatgagaaaaagagaggaggtattttgtgtattgacagctttgacattgtgggtgatggggttaaagatttacttgttgggagagatgacggaatggtggaagtgtatagttttgataatgcaaatgaacctgttctacgatttgatcagatgttgtctgaaagcgtcacatctatccagggtggttgtgtaggaaaagacagctatgatgaaatcgtggtgtccacatattcaggctgggttacaggtctgacaacagagcccattcataaggaaagtggaccaggagaagaactaaaaattaatcaggagatgcagaataaaatttcttccttacggaatgagttggaacatttgcagtataaggtattgcaggaaagagagaattatcaacagtcttctcaatcaagcaaagcaaaatcagcagtaccttcctttggtataaatgataaatttacactaaataaagatgatgccagttacagccttatcttagaggtacagactgcaatagataatgtcttaatacagagtgatgttccaatagatttacttgatgtggataaaaattctgctgttgttagctttagcagctgtgattctgagtcaaacgacaacttccttcttgccacttatcggtgccaggcagatactacaaggctggaactcaagattcgctcaattgaaggccagtatggcacactacaagcatatgtgactccaagaattcaacccaaaacctgtcaggtccgccagtaccacatcaaacctctttcactccatcaaagaactcactttattgatcatgacagacccatgaatacactgaccctaacaggccagttcagttttgctgaagttcactcctgggtggttttttgtctgcctgaagttccagaaaaacctccagcaggagaatgtgtgacattttactttcagaacacctttctagatacacaacttgaaagtacctacagaaaaggagagggagtttttaaatctgacaacatttctactatctccatcctaaaagatgtgctttctaaagaagctacaaaaaggaaaattaacctcaacatatcatacgagataaatgaagtatcagtcaaacacactttaaagctaatccacccaaagctggagtaccagttgcttttggctaagaaagtgcagttaattgatgctttaaaagaattacagattcatgagggaaatacgaactttctgataccagaatatcactgtattctagaagaggcagatcacctacaggaagaatacaaaaagcaacctgcacatcttgaaagactctatggcatgatcactgatcttttcatagataaatttaagtttaaaggcaccaatgtaaaaactaaagtaccccttctattggaaattctggacagttatgaccaaaatgcattgatttcattcttcgatgcagcatga

SEQ ID NO: 461 - DNA, 2133 bp, Homo sapiens
  source 1..2133: mol_type = genomic DNA
atggtgatggcttgcagagtcgtaaacaaaagaagacacatgggacttcaacaactttcatcattcgcggaaacaggaagaactttcctaggcccactaaaatcatccaaatttattatagatgaagaatgtcatgaaagtgtattaatcagttcaacagtaaggcttcttgaaagtttggatttaaccagtgcagtgggacaacttctcaatgaagcagttcaagcacaaaacaacacatatagaactggaatcagtactcttttgtttcttgttggtgcttggagcagtgcagttgaagaatgtcttcatcttggtgtccccatttccataatagtatcagtaatgtcagaaggcttaaacttttgtagtgaagaggtagtttctcttcatgtacctgttcacaatatatttgactgtatggacagcacaaaaacattttctcaacttgaaacatttagtgtaagtttgtgtccttttctacaggtcccttcagatactgatttgatagaggaattgcatggtctcaaagatgttgcctctcaaacactgaccatttccaacctttctgggagacctcttaaatcatatgaattatttaaacctcagacaaaggttgaagcagataacaacacatcacgaactctgaaaaacagcctgcttgcagatacctgctgcagacagtcaatactaatccacagtaggcattttaataggacagataatactgaaggggtaagcaaaccagatggatttcaagaacatgttacagctactcacaaaacttacagatgtaatgatttggtagagttggcagtaggcttgagtcatggagatcacagcagcatgaagttagtagaagaagcagtacagctgcaatatcagaatgcttgtgtgcaacaaggcaactgtacaaaaccatttatgtttgacatttcaagaattttcacttgctgtctaccaggcttacctgaaacttcttcttgtgtttgtccaggatatatcactgttgtgtcagtatctaataatcctgtgatcaaggaattgcagaatcagcctgtgcgaatagttctcattgagggtgacctcacagagaattaccgccacctgggatttaataagtctgcaaatattaaaacagtattagatagcatgcggcttcaagaagacagctcagaagaactgtgggcaaatcacgtgttacaggtgttaatccagttcaaggtgaaccttgtcctggtacaaggaaatgtgtccgaacgcttaattgaaaaatgtataaacagtaagcggttggtaatcggctcagtgaatggcagtgtgatgcaggcttttgcagaggctgcaggagcagtacaggtggcctacattacacaagtgaatgaagattgtgtgggcgacggggtctgcgtgaccttctggagaagcagccctttggatgttgtagataggaacaacagaatcgcaatcttattaaaaacagaaggaattaatttggttacggccgtgctcactaacccagttactgcacagatgcaaatcaaagaagataggttctggacatgtgcctatcgtttgtattatgctctaaaagaggaaaaggtcttccttggaggtggtgcagttgaatttttgtgtcttagctgtcttcatattcttgcagagcaatctctgaaaaaagaaaaccatgcctgctcagggtggctgcataatacttcctcttggctggcttcatctctggcaatatacagaccaactgtgcttaaattcctggcaaatggatggcagaaatacctttcaactctcctatataacactgccaattactcatcagaatttgaagccagcacatacattcaacatcatctgcaaaatgccacagactctggctctccttcatcttacatcttgaatgaatatagtaaactaaatagtagaatttttaattcagacatttcaaataaactggagcagattccgagagtttatgacgttgttacaccaaagattgaggcgtggcgccgagcattggatttagtattgttagtacttcagacagacagtgaaataattactggacatggacacacacagataaattcacaggaattaacgggctttctatttttgtag

SEQ ID NO: 462 - DNA, 1557 bp, Homo sapiens
  source 1..1557: mol_type = genomic DNA
atggccggcctgcggaacgaaagtgaacaggagccgctcttaggcgacacacctggaagcagagaatgggacattttagagactgaagagcattataagagccgatggagatctattaggattttatatcttactatgtttctcagcagtgtagggttttctgtagtgatgatgtccatatggccatatctccaaaagattgatccgacagctgatacaagttttttgggctgggttattgcttcatatagtcttggccaaatggtagcttcacctatatttggtttatggtctaattatagaccaagaaaagagcctcttattgtctccatcttgatttccgtggcagccaactgcctctatgcatatctccacatcccagcttctcataataaatactacatgctggttgctcgtggattgttgggaattggagcaggaaatgtagcagttgttagatcatatactgctggtgctacttcccttcaggaaagaacaagttccatggcaaacataagcatgtgtcaagcattaggttttattctaggtccagtttttcagacttgttttacattccttggagaaaaaggtgtgacatgggatgtgattaaactgcagataaacatgtatacaacaccagttttacttagcgccttcctgggaattttaaatattattctgatccttgccatactaagagaacatcgtgtggatgactcaggaagacagtgtaaaagtattaattttgaagaagcaagtacagatgaagctcaggttccccaaggaaatattgaccaggttgctgttgtggccatcaatgttctgttttttgtgactctatttatctttgccctttttgaaaccatcattactccattaacaatggatatgtatgcctggactcaagaacaagctgtgttatataatggcataatacttgctgctcttggggttgaagccgttgttattttcttaggagttaagttgctttccaaaaagattggcgagcgtgctattctactgggaggactcatcgttgtatgggttggcttctttatcttgttaccttggggaaatcaatttcccaaaatacagtgggaagatttgcacaataattcaatccctaataccacatttggggaaattattattggtctttggaagtctccaatggaagatgacaatgaaagaccaactggttgctcgattgaacaagcctggtgcctctacaccccggtgattcatctggcccagttccttacatcagctgtgctaataggattaggctatccagtctgcaatcttatgtcctatactctatattcaaaaattctaggaccaaaacctcagggtgtatacatgggctggttaacagcatctggaagtggagcccggattcttgggcctatgttcatcagccaagtgtatgctcactggggaccacgatgggcattcagcctggtgtgtggaataatagtgctcaccatcaccctcctgggagtggtttacaaaagactcattgctctttctgtaagatatgggaggattcaggaataa

SEQ ID NO: 463 - DNA, 2913 bp, Homo sapiens
  source 1..2913: mol_type = genomic DNA
atggcgacctgcatcggggagaagatcgaggattttaaagttggaaatctgcttggtaaaggatcatttgctggtgtctacagagctgagtccattcacactggtttggaagttgcaatcaaaatgatagataagaaagccatgtacaaagcaggaatggtacagagagtccaaaatgaggtgaaaatacattgccaattgaaacatccttctatcttggagctttataactattttgaagatagcaattatgtgtatctggtattagaaatgtgccataatggagaaatgaacaggtatctaaagaatagagtgaaacccttctcagaaaatgaagctcgacacttcatgcaccagatcatcacagggatgttgtatcttcattctcatggtatactacaccgggacctcacactttctaacctcctactgactcgtaatatgaacatcaagattgctgattttgggctggcaactcaactgaaaatgccacatgaaaagcactatacattatgtggaactcctaactacatttcaccagaaattgccactcgaagtgcacatggccttgaatctgatgtttggtccctgggctgtatgttttatacattacttatcgggagaccacccttcgacactgacacagtcaagaacacattaaataaagtagtattggcagattatgaaatgccatcttttttgtcaatagaggccaaggaccttattcaccagttacttcgtagaaatccagcagatcgtttaagtctgtcttcagtattggaccatccttttatgtcccgaaattcttcaacaaaaagtaaagatttaggaactgtggaagactcaattgatagtgggcatgccacaatttctactgcaattacagcttcttccagtaccagtataagtggtagtttatttgacaaaagaagacttttgattggtcagccactcccaaataaaatgactgtatttccaaagaataaaagttcaactgatttttcttcttcaggagatggaaacagtttttatactcagtggggaaatcaagaaaccagtaatagtggaaggggaagagtaattcaagatgcagaagaaaggccacattctcgataccttcgtagagcttattcctctgatagatctggcacttctaatagtcagtctcaagcaaaaacatatacaatggaacgatgtcactcagcagaaatgctttcagtgtccaaaagatcaggaggaggtgaaaatgaagagaggtactcacccacagacaacaatgccaacatttttaacttctttaaagaaaagacatccagtagttctggatcttttgaaagacctgataacaatcaagcactctccaatcatctttgtccaggaaaaactccttttccatttgcagacccgacacctcagactgaaaccgtacaacagtggtttgggaatctgcaaataaatgctcatttaagaaaaactactgaatatgacagcatcagcccaaaccgggacttccagggccatccagatttgcagaaggacacatcaaaaaatgcctggactgatacaaaagtcaaaaagaactctgatgcttctgataatgcacattctgtaaaacagcaaaataccatgaaatatatgactgcacttcacagtaaacctgagataatccaacaagaatgtgtttttggctcagatcctctttctgaacagagcaagactaggggtatggagccaccatggggttatcagaatcgtacattaagaagcattacatctccgttggttgctcacaggttaaaaccaatcagacagaaaaccaaaaaggctgtggtgagcatacttgattcagaggaggtgtgtgtggagcttgtaaaggagtatgcatctcaagaatatgtgaaagaagttcttcagatatctagtgatggaaatacgatcactatttattatccaaatggtggtagaggttttcctcttgctgatagaccaccctcacctactgacaacatcagtaggtacagctttgacaatttaccagaaaaatactggcgaaaatatcaatatgcttccaggtttgtacagcttgtaagatctaaatctcccaaaatcacttattttacaagatatgctaaatgcattttgatggagaattctcctggtgctgattttgaggtttggttttatgatggggtaaaaatacacaaaacagaagatttcattcaggtgattgaaaagacagggaagtcttacactttaaaaagtgaaagtgaagttaatagcttgaaagaggagataaaaatgtatatggaccatgctaatgagggtcatcgtatttgtttagcactggaatccataatttcagaagaggaaaggaaaactaggagtgctccctttttcccaataatcataggaagaaaacctggtagtactagttcacctaaggccttatcacctcctccttctgtggattcaaattacccaacgagagagagagcatctttcaacagaatggtcatgcatagtgctgcttctccaacacaggcaccaatccttaatccctctatggttacaaatgaaggacttggtcttacaactacagcttctggaacagacatctcttctaatagtctaaaagattgtcttcctaaatcagcacaacttttgaaatctgtttttgtgaaaaatgttggttgggctacacagttaactagtggagctgtgtgggttcagtttaatgatgggtcccagttggttgtgcaggcaggagtgtcttctatcagttatacctcaccaaatggtcaaacaactaggtatggagaaaatgaaaaattaccagactacatcaaacagaaattacagtgtctgtcttccatccttttgatgttttctaatccgactcctaattttcattga

SEQ ID NO: 464 - DNA, 693 bp, Homo sapiens
  source 1..693: mol_type = genomic DNA
atgaagaaccccatgctggaggtggtgtctttactactggagaagctgctcctcatctccaacttcacgctctttagttcgggcgccgcgggcgaagacaaagggaggaacagtttttatgaaaccagctctttccaccgaggcgacgtgctggaggtgccccggacccacctgacccactatggcatctacctaggagacaaccgtgttgcccacatgatgcccgacatcctgttggccctgacagacgacatggggcgcacgcagaaggtggtctccaacaagcgtctcatcctgggcgttattgtcaaagtggccagcatccgcgtggacacagtggaggacttcgcctacggagctaacatcctggtcaatcacctggacgagtccctccagaaaaaggcactgctcaacgaggaggtggcgcggagggctgaaaagctgctgggctttaccccctacagcctgctgtggaacaactgcgagcacttcgtgacctactgcagatatggcaccccgatcagtccccagtccgacaagttttgtgagactgtgaagataattattcgtgatcagagaagtgttcttgcttcagcagtcttgggattggcgtctatagtctgtacgggcttggtatcatacactacccttcctgcaatttttattccattcttcctatggatggctggctaa

SEQ ID NO: 465 - DNA, 2715 bp, Homo sapiens
  source 1..2715: mol_type = genomic DNA
atgagacagactttgccttgtatctacttttgggggggccttttgccctttgggatgctgtgtgcatcctccaccaccaagtgcactgttagccatgaagttgctgactgcagccacctgaagttgactcaggtacccgatgatctacccacaaacataacagtgttgaaccttacccataatcaactcagaagattaccagccgccaacttcacaaggtatagccagctaactagcttggatgtaggatttaacaccatctcaaaactggagccagaattgtgccagaaacttcccatgttaaaagttttgaacctccagcacaatgagctatctcaactttctgataaaacctttgccttctgcacgaatttgactgaactccatctcatgtccaactcaatccagaaaattaaaaataatccctttgtcaagcagaagaatttaatcacattagatctgtctcataatggcttgtcatctacaaaattaggaactcaggttcagctggaaaatctccaagagcttctattatcaaacaataaaattcaagcgctaaaaagtgaagaactggatatctttgccaattcatctttaaaaaaattagagttgtcatcgaatcaaattaaagagttttctccagggtgttttcacgcaattggaagattatttggcctctttctgaacaatgtccagctgggtcccagccttacagagaagctatgtttggaattagcaaacacaagcattcggaatctgtctctgagtaacagccagctgtccaccaccagcaatacaactttcttgggactaaagtggacaaatctcactatgctcgatctttcctacaacaacttaaatgtggttggtaacgattcctttgcttggcttccacaactagaatatttcttcctagagtataataatatacagcatttgttttctcactctttgcacgggcttttcaatgtgaggtacctgaatttgaaacggtcttttactaaacaaagtatttcccttgcctcactccccaagattgatgatttttcttttcagtggctaaaatgtttggagcaccttaacatggaagataatgatattccaggcataaaaagcaatatgttcacaggattgataaacctgaaatacttaagtctatccaactcctttacaagtttgcgaactttgacaaatgaaacatttgtatcacttgctcattctcccttacacatactcaacctaaccaagaataaaatctcaaaaatagagagtgatgctttctcttggttgggccacctagaagtacttgacctgggccttaatgaaattgggcaagaactcacaggccaggaatggagaggtctagaaaatattttcgaaatctatctttcctacaacaagtacctgcagctgactaggaactcctttgccttggtcccaagccttcaacgactgatgctccgaagggtggcccttaaaaatgtggatagctctccttcaccattccagcctcttcgtaacttgaccattctggatctaagcaacaacaacatagccaacataaatgatgacatgttggagggtcttgagaaactagaaattctcgatttgcagcataacaacttagcacggctctggaaacacgcaaaccctggtggtcccatttatttcctaaagggtctgtctcacctccacatccttaacttggagtccaacggctttgacgagatcccagttgaggtcttcaaggatttatttgaactaaagatcatcgatttaggattgaataatttaaacacacttccagcatctgtctttaataatcaggtgtctctaaagtcattgaaccttcagaagaatctcataacatccgttgagaagaaggttttcgggccagctttcaggaacctgactgagttagatatgcgctttaatccctttgattgcacgtgtgaaagtattgcctggtttgttaattggattaacgagacccataccaacatccctgagctgtcaagccactacctttgcaacactccacctcactatcatgggttcccagtgagactttttgatacatcatcttgcaaagacagtgccccctttgaactctttttcatgatcaataccagtatcctgttgatttttatctttattgtacttctcatccactttgagggctggaggatatctttttattggaatgtttcagtacatcgagttcttggtttcaaagaaatagacagacagacagaacagtttgaatatgcagcatatataattcatgcctataaagataaggattgggtctgggaacatttctcttcaatggaaaaggaagaccaatctctcaaattttgtctggaagaaagggactttgaggcgggtgtttttgaactagaagcaattgttaacagcatcaaaagaagcagaaaaattatttttgttataacacaccatctattaaaagacccattatgcaaaagattcaaggtacatcatgcagttcaacaagctattgaacaaaatctggattccattatattggttttccttgaggagattccagattataaactgaaccatgcactctgtttgcgaagaggaatgtttaaatctcactgcatcttgaactggccagttcagaaagaacggataggtgcctttcgtcataaattgcaagtagcacttggatccaaaaactctgtacattaa

SEQ ID NO: 466 - DNA, 1578 bp, Homo sapiens
  source 1..1578: mol_type = genomic DNA
atggcggggctctggctggggctcgtgtggcagaagctgctgctgtggggcgcggcgagtgccctttccctggccggcgccagtctggtcctgagcctgctgcagagggtggcgagctacgcgcggaaatggcagcagatgcggcccatccccacggtggcccgcgcctacccactggtgggccacgcgctgctgatgaagccggacgggcgagaattttttcagcagatcattgagtacacagaggaataccgccacatgccgctgctgaagctctgggtcgggccagtgcccatggtggccctttataatgcagaaaatgtggaggtaattttaactagttcaaagcaaattgacaaatcctctatgtacaagtttttagaaccatggcttggcctaggacttcttacaagtactggaaacaaatggcgctccaggagaaagatgttaacacccactttccattttaccattctggaagatttcttagatatcatgaatgaacaagcaaatatattggttaagaaacttgaaaaacacattaaccaagaagcatttaactgctttttttacatcactctttgtgccttagatatcatctgtgaaacagctatggggaagaatattggtgctcaaagtaatgatgattccgagtatgtccgtgcagtttatagaatgagtgagatgatatttcgaagaataaagatgccctggctttggcttgatctctggtaccttatgtttaaagaaggatgggaacacaaaaagagccttcagatcctacatacttttaccaacagtgtcatcgctgaacgggccaatgaaatgaacgccaatgaagactgtagaggtgatggcaggggctctgccccctccaaaaataaacgcagggcctttcttgacttgcttttaagtgtgactgatgacgaagggaacaggctaagtcatgaagatattcgagaagaagttgacaccttcatgtttgaggggcacgatacaactgcagctgcaataaactggtccttatacctgttgggttctaacccagaagtccagaaaaaagtggatcatgaattggatgacgtgtttgggaagtctgaccgtcccgctacagtagaagacctgaagaaacttcggtatctggaatgtgttattaaggagacccttcgcctttttccttctgttcctttatttgcccgtagtgttagtgaagattgtgaagtggcaggttacagagttctaaaaggcactgaagccgtcatcattccctatgcattgcacagagatccgagatacttccccaaccccgaggagttccagcctgagcggttcttccccgagaatgcacaagggcgccatccatatgcctacgtgcccttctctgctggccccaggaactgtataggtcaaaagtttgctgtgatggaagaaaagaccattctttcgtgcatcctgaggcacttttggatagaatccaaccagaaaagagaagagcttggtctagaaggacagttgattcttcgtccaagtaatggcatctggatcaagttgaagaggagaaatgcagatgaacgctaa

SEQ ID NO: 467 - DNA, 1419 bp, Homo sapiens
  source 1..1419: mol_type = genomic DNA
atgagcaacatctacatccaggagcctcccacgaatgggaaggttttattgaaaactacagctggagatattgacatagagttgtggtccaaagaagctcctaaagcttgcagaaattttatccaactttgtttggaagcttattatgacaataccatttttcatagagttgtgcctggtttcatagtccaaggcggagatcctactggcacagggagtggtggagagtctatctatggagcgccattcaaagatgaatttcattcacggttgcgttttaatcggagaggactggttgccatggcaaatgctggttctcatgataatggcagccagtttttcttcacactgggtcgagcagatgaacttaacaataagcataccatctttggaaaggttacaggggatacagtatataacatgttgcgactgtcagaagtagacattgatgatgacgaaagaccacataatccacacaaaataaaaagctgtgaggttttgtttaatccttttgatgacatcattccaagggaaattaaaaggctgaaaaaagagaaaccagaggaggaagtaaagaaattgaaacccaaaggcacaaaaaattttagtttactttcatttggagaggaagctgaggaagaagaggaggaagtaaatcgagttagtcagagcatgaagggcaaaagcaaaagtagtcatgacttgcttaaggatgatccacatctcagttctgttccagttgtagaaagtgaaaaaggtgatgcaccagatttagttgatgatggagaagatgaaagtgcagagcatgatgaatatattgatggtgatgaaaagaacctgatgagagaaagaattgccaaaaaattaaaaaaggacacaagtgcgaatgttaaatcagctggagaaggagaagtggagaagaaatcagtcagccgcagtgaagagctcagaaaagaagcaagacaattaaaacgggaactcttagcagcaaaacaaaaaaaagtagaaaatgcagcaaaacaagcagaaaaaagaagtgaagaggaagaagcccctccagatggtgctgttgccgaatacagaagagaaaagcaaaagtatgaagctttgaggaagcaacagtcaaagaagggaacttcccgggaagatcagacccttgcactgctgaaccagtttaaatctaaactcactcaagcaattgctgaaacgcctgaaaatgacattcctgaaacagaagtagaagatgatgaaggatggatgtcacatgtacttcagtttgaggataaaagcagaaaagtgaaagatgcaagcatgcaagactcagatacatttgaaatctatgatcctcggaatccagtgaataaaagaaggagggaagaaagcaaaaagctgatgagagagaaaaaagaaagaagataa

SEQ ID NO: 468 - DNA, 1728 bp, Homo sapiens
  source 1..1728: mol_type = genomic DNA
atgtcatcagatgaggagaaatactcacttccagttgtgcaaaatgactccagtcgaggcagttctgtctcttcgaatcttcaggaagaatatgaagaactgcttcattatgctatagtgactccaaatattgaaccctgtgcttcacagtcatctcatcctaagggagaattggtgccagatgtcagaatttctacaattcatgatattcttcatagtcaaggaaataactctgaagtaagagaaactgcaatagaagttggaaaaggatgtgatttccatatttcaagtcattcaaagacagatgagtcatcaccagtgttatcgccaaggaagccttctcacccagtcatggattttttcagttcacatcttttagctgactcttcctcaccagcaacaaattctagtcatacagatgcccatgaaatacttgtgagcgattttcttgtttctgatgaaaaccttcagaagatggaaaatgtgcttgatctttggagttcaggtcttaagacaaacatcatatctgaactaagtaaatggagacttaattttattgactggcaccgaatggaaatgagaaaagagaaagaaaaacatgcagcacatttaaaacaactgtgtaatcagatcaatgaattgaaggagctgcaaaaaacctttgaaatctccattgggagaaaagatgaggtgatttctagcttgtctcatgccataggcaagcaaaaggaaaagatagagttgatgagaacattcttccactggcgaatcggccatgtcagagccagacaggatgtttatgaaggtaaactagctgaccagtactaccagagaactttactgaagaaagtctggaaagtctggcgttccgtagtgcaaaagcagtggaaagatgtggtagaaagagcttgtcaagcaagagctgaagaagtttgtatccagatttccaatgattatgaagccaaagttgctatgttatctggagctttggaaaatgcaaaagctgagattcaaagaatgcaacatgaaaaagagcactttgaagattccatgaaaaaagctttcatgaggggtgtatgtgcattaaatcttgaagccatgactatatttcaaaacagaaatgatgcagggatagactccacaaataataaaaaggaagagtatggtcctggtgttcaaggaaaagaacattctgctcatttggatccttcagctcctccgatgcccttaccagttacatcaccactgctgccatccccaccagccgccgtcggaggagccagcgcgactgccgttccctcagctgcttcgatgacttctaccagggctgcttccgcatcttctgttcacgttcctgtttctgctcttggtgcaggatctgcagctactgctgcatcagaagaaatgtatgtgccaagagttgtaacctctgcacaacagaaagcaggaagaactattacagcccggatcacaggaagatgtgattttgcttcaaaaaatagaattagcagcagtttagctataatgggagtttctcctcccatgagctcagttgttgtggaaaaacatcatccagtcacagtgcaaaccattcctcaagcaactgcagcaaaatatccccggaccattcatcctgaaagtagtacctcagcttccagatcacttggaaccagatcagctcacacccagtctctcacaagtgttcattccataaaagtggttgactaa

SEQ ID NO: 469 - DNA, 10191 bp, Homo sapiens
  source 1..10191: mol_type = genomic DNA
atgttcataaatataaagagcatcttatggatgtgttcaaccttaatagtaacccatgcgctacataaagtcaaagtgggaaaaagcccaccggtgaggggctccctctctggaaaagtcagcctaccttgtcatttttcaacgatgcctactttgccacccagttacaacaccagtgaatttctccgcatcaaatggtctaagattgaagtggacaaaaatggaaaagatttgaaagagactactgtccttgtggcccaaaatggaaatatcaagattggtcaggactacaaagggagagtgtctgtgcccacacatcccgaggctgtgggcgatgcctccctcactgtggtcaagctgctggcaagtgatgcgggtctttaccgctgtgacgtcatgtacgggattgaagacacacaagacacggtgtcactgactgtggatggggttgtgtttcactacagggcggcaaccagcaggtacacactgaattttgaggctgctcagaaggcttgtttggacgttggggcagtcatagcaactccagagcagctctttgctgcctatgaagatggatttgagcagtgtgacgcaggctggctggctgatcagactgtcagatatcccatccgggctcccagagtaggctgttatggagataagatgggaaaggcaggagtcaggacttatggattccgttctccccaggaaacttacgatgtgtattgttatgtggatcatctggatggtgatgtgttccacctcactgtccccagtaaattcaccttcgaggaggctgcaaaagagtgtgaaaaccaggatgccaggctggcaacagtgggggaactccaggcggcatggaggaacggctttgaccagtgcgattacgggtggctgtcggatgccagcgtgcgccaccctgtgactgtggccagggcccagtgtggaggtggtctacttggggtgagaaccctgtatcgttttgagaaccagacaggcttccctccccctgatagcagatttgatgcctactgctttaaacctaaagaggctacaaccatcgatttgagtatcctcgcagaaactgcatcacccagtttatccaaagaaccacaaatggtttctgatagaactacaccaatcatccctttagttgatgaattacctgtcattccaacagagttccctcccgtgggaaatattgtcagttttgaacagaaagccacagtccaacctcaggctatcacagatagtttagccaccaaattacccacacctactggcagtaccaagaagccctgggatatggatgactactcaccttctgcttcaggacctcttggaaagctagacatatcagaaattaaggaagaagtgctccagagtacaactggcgtctctcattatgctacggattcatgggatggtgtcgtggaagataaacaaacacaagaatcggttacacagattgaacaaatagaagtgggtcctttggtaacatctatggaaatcttaaagcacattccttccaaggaattccctgtaactgaaacaccattggtaactgcaagaatgatcctggaatccaaaactgaaaagaaaatggtaagcactgtttctgaattggtaaccacaggtcactatggattcaccttgggagaagaggatgatgaagacagaacacttacagttggatctgatgagagcaccttgatctttgaccaaattcctgaagtcattacggtgtcaaagacttcagaagacaccatccacactcatttagaagacttggagtcagtctcagcatccacaactgtttcccctttaattatgcctgataataatggatcatccatggatgactgggaagagagacaaactagtggtaggataacggaagagtttcttggcaaatatctgtctactacaccttttccatcacagcatcgtacagaaatagaattgtttccttattctggtgataaaatattagtagagggaatttccacagttatttatccttctctacaaacagaaatgacacatagaagagaaagaacagaaacactaataccagagatgagaacagatacttatacagatgaaatacaagaagagatcactaaaagtccatttatgggaaaaacagaagaagaagtcttctctgggatgaaactctctacatctctctcagagccaattcatgttacagagtcttctgtggaaatgaccaagtcttttgatttcccaacattgataacaaagttaagtgcagagccaacagaagtaagagatatggaggaagactttacagcaactccaggtactacaaaatatgatgaaaatattacaacagtgcttttggcccatggtactttaagtgttgaagcagccactgtatcaaaatggtcatgggatgaagataatacaacatccaagcctttagagtctacagaaccttcagcctcttcaaaattgccccctgccttactcacaactgtggggatgaatggaaaggataaagacatcccaagtttcactgaagatggagcagatgaatttactcttattccagatagtactcaaaagcagttagaggaggttactgatgaagacatagcagcccatggaaaattcacaattagatttcagccaactacatcaactggtattgcagaaaagtcaactttgagagattctacaactgaagaaaaagttccacctatcacaagcactgaaggccaagtttatgcaaccatggaaggaagtgctttgggtgaagtagaagatgtggacctctctaagccagtatctactgttccccaatttgcacacacttcagaggtggaaggattagcatttgttagttatagtagcacccaagagcctactacttatgtagactcttcccataccattcctctttctgtaattcccaagacagactggggagtgttagtaccttctgttccatcagaagatgaagttctaggtgaaccctctcaagacatacttgtcattgatcagactcgccttgaagcgactatttctccagaaactatgagaacaacaaaaatcacagagggaacaactcaggaagaattcccttggaaagaacagactgcagagaaaccagttcctgctctcagttctacagcttggactcccaaggaggcagtaacaccactggatgaacaagagggcgatggatcagcatatacagtctctgaagatgaattgttgacaggttctgagagggtcccagttttagaaacaactccagttggaaaaattgatcacagtgtgtcttatccaccaggtgctgtaactgagcacaaagtgaaaacagatgaagtggtaacactaacaccacgcattgggccaaaagtatctttaagtccagggcctgaacaaaaatatgaaacagaaggtagtagtacaacaggatttacatcatctttgagtccttttagtacccacattacccagcttatggaagaaaccactactgagaaaacatccctagaggatattgatttaggctcaggattatttgaaaagcccaaagccacagaactcatagaattttcaacaatcaaagtcacagttccaagtgatattaccactgccttcagttcagtagacagacttcacacaacttcagcattcaagccatcttccgcgatcactaagaaaccacctctcatcgacagggaacctggtgaagaaacaaccagtgacatggtaatcattggagaatcaacatctcatgttcctcccactacccttgaagatattgtagccaaggaaacagaaaccgatattgatagagagtatttcacgacttcaagtcctcctgctacacagccaacaagaccacccactgtggaagacaaagaggcctttggacctcaggcgctttctacgccacagcccccagcaagcacaaaatttcaccctgacattaatgtttatattattgaggtcagagaaaataagacaggtcgaatgagtgatttgagtgtaattggtcatccaatagattcagaatctaaagaagatgaaccttgtagtgaagaaacagatccagtgcatgatctaatggctgaaattttacctgaattccctgacataattgaaatagacctataccacagtgaagaaaatgaagaagaagaagaagagtgtgcaaatgctactgatgtgacaaccaccccatctgtgcagtacataaatgggaagcatctcgttaccactgtgcccaaggacccagaagctgcagaagctaggcgtggccagtttgaaagtgttgcaccttctcagaatttctcggacagctctgaaagtgatactcatccatttgtaatagccaaaacggaattgtctactgctgtgcaacctaatgaatctacagaaacaactgagtctcttgaagttacatggaagcctgagacttaccctgaaacatcagaacatttttcaggtggtgagcctgatgttttccccacagtcccattccatgaggaatttgaaagtggaacagccaaaaaaggggcagaatcagtcacagagagagatactgaagttggtcatcaggcacatgaacatactgaacctgtatctctgtttcctgaagagtcttcaggagagattgccattgaccaagaatctcagaaaatagcctttgcaagggctacagaagtaacatttggtgaagaggtagaaaaaagtacttctgtcacatacactcccactatagttccaagttctgcatcagcatatgtttcagaggaagaagcagttaccctaataggaaatccttggccagatgacctgttgtctaccaaagaaagctgggtagaagcaactcctagacaagttgtagagctctcagggagttcttcgattccaattacagaaggctctggagaagcagaagaagatgaagatacaatgttcaccatggtaactgatttatcacagagaaatactactgatacactcattactttagacactagcaggataatcacagaaagcttttttgaggttcctgcaaccaccatttatccagtttctgaacaaccttctgcaaaagtggtgcctaccaagtttgtaagtgaaacagacacttctgagtggatttccagtaccactgttgaggaaaagaaaaggaaggaggaggagggaactacaggtacggcttctacatttgaggtatattcatctacacagagatcggatcaattaattttaccctttgaattagaaagtccaaatgtagctacatctagtgattcaggtaccaggaaaagttttatgtccttgacaacaccaacacagtctgaaagggaaatgacagattctactcctgtctttacagaaacaaatacattagaaaatttgggggcacagaccactgagcacagcagtatccatcaacctggggttcaggaagggctgaccactctcccacgtagtcctgcctctgtctttatggagcagggctctggagaagctgctgccgacccagaaaccaccactgtttcttcattttcattaaacgtagagtatgcaattcaagccgaaaaggaagtagctggcactttgtctccgcatgtggaaactacattctccactgagccaacaggactggttttgagtacagtaatggacagagtagttgctgaaaatataacccaaacatccagggaaatagtgatttcagagcgattaggagaaccaaattatggggcagaaataaggggcttttccacaggttttcctttggaggaagatttcagtggtgactttagagaatactcaacagtgtctcatcccatagcaaaagaagaaacggtaatgatggaaggctctggagatgcagcatttagggacacccagacttcaccatctacagtacctacttcagttcacatcagtcacatatctgactcagaaggacccagtagcaccatggtcagcacttcagccttcccctgggaagagtttacatcctcagctgagggctcaggtgagcaactggtcacagtcagcagctctgttgttccagtgcttcccagtgctgtgcaaaagttttctggtacagcttcctccattatcgacgaaggattgggagaagtgggtactgtcaatgaaattgatagaagatccaccattttaccaacagcagaagtggaaggtacgaaagctccagtagagaaggaggaagtaaaggtcagtggcacagtttcaacaaactttccccaaactatagagccagccaaattatggtctaggcaagaagtcaaccctgtaagacaagaaattgaaagtgaaacaacatcagaggaacaaattcaagaagaaaagtcatttgaatcccctcaaaactctcctgcaacagaacaaacaatctttgattcacagacatttactgaaactgaactcaaaaccacagattattctgtactaacaacaaagaaaacttacagtgatgataaagaaatgaaggaggaagacacttctttagttaacatgtctactccagatccagatgcaaatggcttggaatcttacacaactctccctgaagctactgaaaagtcacattttttcttagctactgcattagtaactgaatctataccagctgaacatgtagtcacagattcaccaatcaaaaaggaagaaagtacaaaacattttccgaaaggcatgagaccaacaattcaagagtcagatactgagctcttattctctggactgggatcaggagaagaagttttacctactctaccaacagagtcagtgaattttactgaagtggaacaaatcaataacacattatatccccacacttctcaagtggaaagtacctcaagtgacaaaattgaagactttaacagaatggaaaatgtggcaaaagaagttggaccactcgtatctcaaacagacatctttgaaggtagtgggtcagtaaccagcacaacattaatagaaattttaagtgacactggagcagaaggacccacggtggcacctctccctttctccacggacatcggacatcctcaaaatcagactgtcaggtgggcagaagaaatccagactagtagaccacaaaccataactgaacaagactctaacaagaattcttcaacagcagaaattaacgaaacaacaacctcatctactgattttctggctagagcttatggttttgaaatggccaaagaatttgttacatcagcaccaaaaccatctgacttgtattatgaaccttctggagaaggatctggagaagtggatattgttgattcatttcacacttctgcaactactcaggcaaccagacaagaaagcagcaccacatttgtttctgatgggtccctggaaaaacatcctgaggtgccaagcgctaaagctgttactgctgatggattcccaacagtttcagtgatgctgcctcttcattcagagcagaacaaaagctcccctgatccaactagcacactgtcaaatacagtgtcatatgagaggtccacagacggtagtttccaagaccgtttcagggaattcgaggattccaccttaaaacctaacagaaaaaaacccactgaaaatattatcatagacctggacaaagaggacaaggatttaatattgacaattacagagagtaccatccttgaaattctacctgagctgacatcggataaaaatactatcatagatattgatcatactaaacctgtgtatgaagacattcttggaatgcaaacagatatagatacagaggtaccatcagaaccacatgacagtaatgatgaaagtaatgatgacagcactcaagttcaagagatctatgaggcagctgtcaacctttctttaactgaggaaacatttgagggctctgctgatgttctggctagctacactcaggcaacacatgatgaatcaatgacttatgaagatagaagccaactagatcacatgggctttcacttcacaactgggatccctgctcctagcacagaaacagaattagacgttttacttcccacggcaacatccctgccaattcctcgtaagtctgccacagttattccagagattgaaggaataaaagctgaagcaaaagccctggatgacatgtttgaatcaagcactttgtctgatggtcaagctattgcagaccaaagtgaaataataccaacattgggccaatttgaaaggactcaggaggagtatgaagacaaaaaacatgctggtccttcttttcagccagaattctcttcaggagctgaggaggcattagtagaccatactccctatctaagtattgctactacccaccttatggatcagagtgtaacagaggtgcctgatgtgatggaaggatccaatcccccatattacactgatacaacattagcagtttcaacatttgcgaagttgtcttctcagacaccatcatctcccctcactatctactcaggcagtgaagcctctggacacacagagatcccccagcccagtgctctgccaggaatagacgtcggctcatctgtaatgtccccacaggattcttttaaggaaattcatgtaaatattgaagcgactttcaaaccatcaagtgaggaataccttcacataactgagcctccctctttatctcctgacacaaaattagaaccttcagaagatgatggtaaacctgagttattagaagaaatggaagcttctcccacagaacttattgctgtggaaggaactgagattctccaagatttccaaaacaaaaccgatggtcaagtttctggagaagcaatcaagatgtttcccaccattaaaacacctgaggctggaactgttattacaactgccgatgaaattgaattagaaggtgctacacagtggccacactctacttctgcttctgccacctatggggtcgaggcaggtgtggtgccttggctaagtccacagacttctgagaggcccacgctttcttcttctccagaaataaaccctgaaactcaagcagctttaatcagagggcaggattccacgatagcagcatcagaacagcaagtggcagcgagaattcttgattccaatgatcaggcaacagtaaaccctgtggaatttaatactgaggttgcaacaccaccattttcccttctggagacttctaatgaaacagatttcctgattggcattaatgaagagtcagtggaaggcacggcaatctatttaccaggacctgatcgctgcaaaatgaacccgtgccttaacggaggcacctgttatcctactgaaacttcctacgtatgcacctgtgtgccaggatacagcggagaccagtgtgaacttgattttgatgaatgtcactctaatccctgtcgtaatggagccacttgtgttgatggttttaacacattcaggtgcctctgccttccaagttatgttggtgcactttgtgagcaagataccgagacatgtgactatggctggcacaaattccaagggcagtgctacaaatactttgcccatcgacgcacatgggatgcagctgaacgggaatgccgtctgcagggtgcccatctcacaagcatcctgtctcacgaagaacaaatgtttgttaatcgtgtgggccatgattatcagtggataggcctcaatgacaagatgtttgagcatgacttccgttggactgatggcagcacactgcaatacgagaattggagacccaaccagccagacagcttcttttctgctggagaagactgtgttgtaatcatttggcatgagaatggccagtggaatgatgttccctgcaattaccatctcacctatacgtgcaagaaaggaacagtcgcttgcggccagccccctgttgtagaaaatgccaagacctttggaaagatgaaacctcgttatgaaatcaactccctgattagataccactgcaaagatggtttcattcaacgtcaccttccaactatccggtgcttaggaaatggaagatgggctatacctaaaattacctgcatgaacccatctgcataccaaaggacttattctatgaaatactttaaaaattcctcatcagcaaaggacaattcaataaatacatccaaacatgatcatcgttggagccggaggtggcaggagtcgaggcgctga

SEQ ID NO: 470 - DNA, 18921 bp, Homo sapiens
  source 1..18921: mol_type = genomic DNA
atgtcggtgttcctggggccagggatgccctctgcatctttattagtaaatcttctttcagctttactcatcctatttgtgtttggagaaacagaaataagatttactggacaaactgaatttgttgttaatgaaacaagtacaacagttattcgtcttatcattgaaaggataggagagccagcaaatgttactgcaattgtatcgctgtatggagaggacgctggtgacttttttgacacatatgctgcagcttttatacctgccggagaaacaaacagaacagtgtacatagcagtatgtgatgatgacttaccagagcctgacgaaacttttatttttcacttaacattacagaaaccttcagcaaatgtgaagcttggatggccaaggactgttactgtgacaatattatcaaatgacaatgcatttggaattatttcatttaatatgcttccctcaatcgcagtgagtgagcccaagggcagaaatgagtctatgcctcttactctcatcagggaaaagggaacctatggaatggtcatggtgacttttgaggtagagggtggcccaaatccccctgatgaagatttgagtccagttaaaggaaatatcacctttccccctggcagagcaacagtaatttataacttgacagtactcgatgacgaggtaccagaaaatgatgaaatatttttaattcaactgaaaagtgtagaaggaggagctgagattaacacctctaggaattccattgagatcatcattaagaaaaatgatagtcccgtgagattccttcagagtatttatttggttcctgaggaagaccacatactcataattccagtagttcgtggaaaggacaacaatggaaatctgattggatctgatgaatatgaggtttcaatcagttatgctgtcacaactgggaattccacagcacatgcccagcaaaatctggacttcattgatcttcagccaaacacaactgttgtttttccaccttttattcatgaatctcacttgaaatttcaaatagttgatgacaccataccggagattgctgaatcgtttcacattatgttactaaaagataccttacagggagatgctgtgctaataagcccttctgttgtacaagtcaccattaagccaaatgataaaccttatggagtcctttcattcaacagtgttttgtttgaaaggacagttataattgatgaagatagaatatcaagatatgaagaaatcacagtggttagaaatggaggaacccatgggaatgtctctgcgaattgggtgttgacacggaacagcactgatccctcaccagtaacagcagatatcagaccgagctctggagttctccattttgcacaagggcagatgttggcaacaattcctcttactgtggttgatgatgatcttccagaagaggcagaagcttatctacttcaaattctgcctcatacaatacgaggaggtgcagaagtgagcgagccagcggagcttttgttctacattcaggatagtgatgatgtctatggcctaataacattttttcctatggaaaaccagaagattgaaagcagcccaggtgaacgatacttatccttgagttttacaagactaggagggactaaaggagatgtgaggttgctttattctgtactttacattcctgctggagctgtggaccccttgcaagcaaaagaaggcatcttaaatatatcaaggagaaatgacctcatttttccagagcaaaaaactcaagtcactacaaaattaccaataagaaatgatgcattccttcaaaatggagctcactttctagtacagttggaaactgtggagttgttaaacataattcctctaatcccacccataagccctagatttggggaaatctgcaatatttctttactggttactccagccattgcaaatggagaaattggctttctcagcaatcttccaattattttgcatgaaccagaagattttgctgctgaagtggtatacattcccttacatcgggatggaactgatggccaggctactgtctactggagtttgaagccctctggctttaattcaaaagcagtgaccccggatgatataggcccctttaatggctctgttttgtttttatctgggcaaagtgacacaacaatcaacattactatcaaaggtgatgacataccggaaatgaatgaaactgtaacactttctctagacagggttaacgtggaaaaccaagtgctgaaatctggatatactagccgtgacctaattattttggaaaatgatgaccctgggggagtttttgaattttctcctgcttccagaggaccctatgttataaaagaaggagaatctgtagagctccacatcatccgatcaagggggtcccttgttaagcagtttctacactaccgagtagagccaagagatagcaatgaattctatggaaacacgggagtactagaatttaaacctggagaaagggagatagtgatcaccttgctagcaagattggatgggataccagagttggatgaacactactgggtggtcctcagcagccacggagaacgggaaagcaagttgggaagtgccaccattgtcaatataacgattctgaaaaatgatgatcctcatggcattatagaatttgtttctgatggtctaattgtgatgataaatgaaagcaaaggagatgctatctatagtgctgtttatgatgtagtaagaaatcgaggcaactttggtgatgttagtgtatcatgggtggttagtccagactttacacaagatgtatttcctgtacaagggactgttgtctttggagatcaggaattttcaaaaaatatcaccatttactcccttccagatgagattccagaagaaatggaagaatttaccgttatcctactgaatggcactggaggagctaaagtgggaaatagaacaactgcaactctgaggattagaagaaatgatgaccccatttattttgcagaacctcgtgtagtgagggttcaggaaggtgagactgccaactttacagttctcagaaatggatctgttgatgtgacttgcatggtccagtatgctaccaaggatgggaaggctactgcaagagagagagatttcattcctgttgaaaaaggagaaacgctcatttttgaggttggaagtagacagcagagcatatccatatttgttaatgaagatggtatcccggaaacagatgagcccttttatataatcctcttgaattcaacaggtgatacagtagtatatcaatatggagtagctacagtaataattgaagctaatgatgacccaaatggcattttttctctggagcccatagacaaagcagtggaagaaggaaagactaatgcattttggattttgaggcaccgaggatactttggtagtgtttctgtatcttggcagctctttcagaatgattctgctttgcagcctgggcaggagttctatgaaacttcaggaactgttaacttcatggatggagaagaagcaaaaccaatcattctccatgcttttccagataaaattcctgaattcaatgaattttatttcctaaaacttgtaaacatttcaggtggatccccaggtcctgggggccagctagcagaaaccaacctccaggtgacagtaatggttccattcaatgatgatccctttggagtttttatcttggatccagagtgtttagagagagaagtggcagaagatgtcctgtctgaagatgatatgtcttatattaccaacttcaccattttgaggcagcagggtgtgtttggtgatgtacaactgggctgggaaatactgtccagtgagttccctgctggtttgccaccaatgatagattttttactggttggaattttccccaccaccgtgcatttacaacagcacatgcggcgtcaccacagtggaacggatgctttgtactttaccggactagagggtgcatttgggactgttaatccaaaataccatccctccaggaataatacaattgccaactttacattctcagcttgggtaatgcccaatgccaatacgaatggattcattatagcgaaggatgacggtaatggaagcatctactacggggtaaaaatacaaacaaacgaatcccatgtgacactttcccttcattataaaaccttgggttccaatgctacatacattgccaagacaacagtcatgaaatatttagaagaaagtgtttggcttcatctactaattatcctggaggatggtataatcgaattctacctggatggaaatgcaatgcccaggggaatcaagagtctgaaaggagaagccattactgacggtcctgggatactgagaattggagcagggataaatggcaatgacagatttacaggtctgatgcaggatgtgaggtcctatgagcggaaactgacgcttgaagaaatttatgaacttcatgccatgcccgcaaaaagtgatttacacccaatttctggatatctggagttcagacagggagaaactaacaaatcattcattatttctgcaagagatgacaatgacgaggaaggagaagaattattcattcttaaactagtttctgtatatggaggagctcgtatttcggaagaaaatactactgcaagattaacaatacaaaaaagtgacaatgcaaatggcttgtttggtttcacaggagcttgtataccagagattgcagaggagggatcaaccatttcttgtgtggttgagagaaccagaggagctctggattatgtgcatgttttttacaccatttcacagattgaaactgatggcattaattaccttgttgatgactttgctaatgccagtggaactattacattccttccttggcagagatcagaggttctgaatatatatgttcttgatgatgatattcctgaacttaatgagtatttccgtgtgacattggtttctgcaattcctggagatgggaagctaggctcaactcctaccagtggtgcaagcatagatcctgaaaaggaaacgactgatatcaccatcaaagctagtgatcatccatatggcttgctgcagttctccacagggctgcctcctcagcctaaggacgcaatgaccctgcctgcaagcagcgttccacatatcactgtggaggaggaagatggagaaatcaggttattggtcatccgtgcacagggacttctgggaagggtgactgcggaatttagaacagtgtccttgacagcattcagtcctgaggattaccagaatgttgctggcacattagaatttcaaccaggagaaagatataaatacattttcataaacatcactgataattctattcctgaactggaaaaatcttttaaagttgagttgttaaacttggaaggaggagtagctgaactctttagggttgatggaagtggtagtggtgatggggacatggaattcttccttccaactattcacaaacgtgccagtctaggagtggcttcccaaattctagtgacaattgcagcctctgaccacgctcatggcgtatttgaatttagccctgagtcactctttgtcagtggaactgaaccagaagatgggtatagcactgttacattaaatgttataagacatcatggaactctgtctccagtgactttgcattggaacatagactctgatcctgatggtgatctcgccttcacctctggcaacatcacatttgagattgggcagacgagcgccaatatcactgtggagatattgcctgacgaagacccagaactggataaggcattctctgtgtcagtcctcagtgtttccagtggttctttgggagctcatattaatgccacgttaacagttttggctagtgatgatccatatgggatattcattttttctgagaaaaacagacctgttaaagttgaggaagcaacccagaacatcacactatcaataataaggttgaaaggcctcatgggaaaagtccttgtctcatatgcaacactagatgatatggaaaaaccaccttattttccacctaatttagcgagagcaactcaaggaagagactatataccagcttctggatttgctctttttggagctaatcagagtgaggcaacaatagctatttcaattttggatgatgatgagccagaaaggtccgaatctgtctttatcgaactactcaactctactttagtagcgaaagtacagagtcgttcaattccaaattctccacgtcttgggcctaaggtagaaactattgcgcaactaattatcattgccaatgatgatgcatttggaactcttcagctctcagcaccaattgtccgagtggcagaaaatcatgttggacccattatcaatgtgactagaacaggaggagcatttgcagatgtctctgtgaagtttaaagctgtgccaataactgcaatagctggtgaagattatagtatagcttcatcagatgtggtcttgctagaaggggaaaccagtaaagccgtgccaatatatgtcattaatgatatctatcctgaactggaagaatcttttcttgtgcaactgatgaatgaaacaacaggaggagccagactaggggctttaacagaggcagtcattattattgaggcctctgatgacccctatggattatttggttttcagattactaaacttattgtagaggaacctgagtttaactcagtgaaggtaaacctgccaataattcgaaattctgggacactcggcaatgttactgttcagtgggttgccaccattaatggacagcttgctactggcgacctgcgagttgtctcaggtaatgtgacctttgcccctggggaaaccattcaaaccttgttgttagaggtcctggctgacgacgttccggagattgaagaggttatccaagtgcaactaactgatgcctctggtggaggtactattgggttagatcgaattgcaaatattattattcctgccaatgatgatccttatggtacagtagcctttgctcagatggtttatcgtgttcaagagcctctggaaagaagttcctgtgctaatataactgtcaggcgaagcggagggcactttggtcggctgttgttgttctacagtacttccgacattgatgtagtggctctggcaatggaggaaggtcaagatttactgtcctactatgaatctccaattcaaggggtgcctgacccactttggagaacttggatgaatgtctctgccgtgggggagcccctgtatacctgtgccactttgtgccttaaggaacaagcttgctcagcgttttcatttttcagtgcttctgagggtccccagtgtttctggatgacatcatggatcagcccagctgtcaacaattcagacttctggacctacaggaaaaacatgaccagggtagcatctctttttagtggtcaggctgtggctgggagtgactatgagcctgtgacaaggcaatgggccataatgcaggaaggtgatgaattcgcaaatctcacagtgtctattcttcctgatgatttcccagagatggatgagagttttctaatttctctccttgaagttcacctcatgaacatttcagccagtttgaaaaatcagccaaccataggacagccaaatatttctacagttgtcatagcactaaatggtgatgcctttggagtgtttgtgatctacaatattagtcccaatacttccgaagatggcttatttgttgaagttcaggagcagccccaaaccttggtggagctgatgatacacaggacagggggcagcttaggtcaagtggcagtcgaatggcgtgttgttggtggaacagctactgaaggtttagattttataggtgctggagagattctgacctttgctgaaggtgaaaccaaaaagacagtcattttaaccatcttggatgactctgaaccagaggatgacgaaagtatcatagttagtttggtgtacactgaaggtggaagtagaattttgccaagctccgacactgttagagtgaacattttggccaatgacaatgtggcaggaattgttagctttcagacagcttccagatctgtcataggtcatgaaggagaaattttacaattccatgtgataagaactttccctggtcgaggaaatgttactgttaactggaaaattattgggcaaaatctagaactcaattttgctaactttagcggacaacttttctttcctgaggggtcgttgaatacaacattgtttgtgcatttgttggatgacaacattcctgaggagaaagaagtataccaagtcattctgtatgatgtcaggacacaaggagttccaccagccggaatcgccctgcttgatgctcaaggatatgcagctgtcctcacagtagaagccagtgatgaaccacatggagttttaaattttgctctttcatcaagatttgtgttactacaagaggctaacataacaattcagcttttcatcaacagagaatttggatctctaggagctatcaatgtcacatataccacggttcctggaatgctgagtctgaagaaccaaacagtaggaaacctagcagagccagaagttgattttgtccctatcattggctttctgattttagaagaaggggaaacagcagcagccatcaacattaccattcttgaggatgatgtaccagagctagaagaatatttcctggtgaatttaacttacgttggacttaccatggctgcttcaacttcatttcctcccagactagattcagaaggtttgactgcacaagttattattgatgccaatgatggggcccgaggtgtaattgaatggcaacaaagcaggtttgaagtaaatgaaacccatggaagtttaacattggtagcccagaggagcagagaacctcttggccatgtttccttatttgtgtatgctcagaatttggaagcacaagtggggctggattatatcttcaccccaatgattcttcattttgctgatggagaaaggtataaaaatgtcaatatcatgattcttgatgatgacattccagaaggagatgaaaaatttcagctgattttaacaaatccttctcctggactagagctagggaaaaatacaatagccttaattattgtccttgctaatgatgacggccctggagttctatcatttaacaacagtgagcactttttcctaagagagccaacagctctctacgtccaggagagtgttgcagtattgtacattgttcgggaacctgcacaaggattgtttggaacagtgacagttcagttcattgtgacagaagtgaattcctcaaatgaatctaaagatctgactccttccaaaggctatattgttttagaagaaggtgttcgattcaaggccctacaaatatctgccatattagacacggaaccagaaatggatgagtattttgtttgcaccttgtttaatccaactggaggtgctagactaggggtgcatgttcaaaccctgataacagttttgcaaaaccaggcccctttggggctattcagtatctctgcagttgaaaatagagccacctccatagacatcgaagaagccaataggaccgtgtatttaaatgtatctcgaactaatggcattgatttggctgtgagtgtgcagtgggagacagtatctgaaacagcctttggcatgaggggaatggatgttgtgttttccgtatttcaaagttttttggatgaatcagcttctggctggtgtttctttactttggaaaatttaatatatggtataatgttaagaaaatcatctgttactgtttaccgatggcaggggatttttattccagttgaggatttaaatatagaaaatcctaaaacttgtgaggcctttaatattggtttttctccctactttgtgattactcatgaagaaagaaatgaagaaaagccttctcttaacagtgtgtttacattcacatctggatttaaattattcctggtacaaacaatcattattctggaaagttctcaagtaagatattttacttcagacagccaagattatttaatcattgcaagtcaaagagatgattccgaattaactcaggtcttcaggtggaatggaggaagcttcgtgttgcatcaaaaactccctgtccgaggtgtgctgaccgtggccttgttcaacaagggaggctctgtgttcttagccatttcccaggctaatgccaggctaaactcccttttattcagatggtctggcagtgggtttattaactttcaagaggtgcctgtcagtgggacaacagaagttgaggctttgtcttcagccaatgatatttacctaatatttgccgaaaatgtctttctaggagatcagaattcaattgatattttcatctgggagatgggacagtcttccttcaggtattttcagtctgtagattttgctgctgttaacagaatccactccttcacaccagcctcaggaatagcccacatacttcttattggccaagatatgtctgctctttactgctggaattcggagcgtaatcaattctcttttgttctggaagtaccttctgcttatgatgtggcttctgttacagtaaagtcccttaattcaagcaagaatttaatagctctagtgggagctcattcacatatatatgagctagcctacatttccagccattctgactttattcctagttcaggtgaactgatatttgaacctggtgagagagaagctacaatagcagtaaatatccttgatgatacagttccagaaaaagaagaatccttcaaagttcaacttaaaaatcccaaaggaggagcagagattggcattaatgattctgtaacaataaccattctgtctaatgatgatgcctatggaattgttgcatttgctcagaattcattatataagcaagtggaagaaatggagcaagatagcctagtaaccttgaacgttgaacgcttaaaaggaacatatggccgtataaccatagcatgggaagctgatggaagtattagtgatatatttcctacctcaggagtgattttatttactgaaggccaggtactgtcaacaatcactctaactattcttgctgataatataccagagttatcagaggttgtgattgtaaccctcacccgtatcaccacagaaggggttgaggactcatacaaaggtgctactattgatcaggacagaagcaagtctgttataacaactttgcccaatgactcaccttttggcttggtgggctggcgtgctgcgtctgtcttcattagagtagcagagcctaaagaaaacaccaccactcttcagttacaaatagctcgagataaaggactacttggggatattgccattcacttgagagctcaacccaatttcttactgcatgtcgataatcaagctactgagaatgaagattatgtattgcaagaaacaataataataatgaaagaaaacataaaagaagctcatgccgaagtttccattttgccggatgaccttcctgaattggaggaaggatttattgtcactatcactgaggtgaacctggtgaactctgacttctctacaggacagccaagtgtgcggaggcccggaatggaaatagctgagataatgatagaagaaaatgacgatcccagaggaatttttatgtttcatgttactagaggcgctggggaagttattactgcctatgaggtgcctccacccttgaacgttcttcaagttcctgtagtccggctggctggaagctttggggcagtaaatgtttattggaaagcatcaccagacagtgctggcctggaagactttaaaccatctcatgggattcttgaatttgcagataaacaggttactgcaatgatagaaatcaccataattgatgatgctgaatttgaattgacagagacgttcaatatttccttgatcagtgttgctggaggtggcagacttggtgatgatgttgtggtaactgttgttattccacaaaatgattctccatttggagtatttggatttgaagaaaagactgtaatgattgatgaatccctttcatccgatgaccctgattcatatgtgacattgacggttgtccggtccccaggaggaaaaggaaccgtccgacttgagtggaccatagatgagaaggctaaacataaccttagtcctttgaatgggacccttcattttgatgagactgagtcccagaagaccattgtgttgcacacacttcaagacacagtgttggaggaggacaggcgtttcaccattcagctgatatcaattgatgaggtagaaatatctccagtaaaaggtagtgcatcaataattattcggggtgataagcgagcatcaggagaagttgggatagctccgtcatctaggcacatcctcattggggaaccctcagcaaaatataatggtaccgctattatcagccttgttcgaggcccagggattttgggggaggtcacagtgttctggaggatattccctccttccgtgggggaatttgctgaaacatcaggaaaactgacaatgcgagacgaacagtctgcagtcattgtagtaatacaggctttgaacgatgacattcccgaggaaaaaagcttctatgagtttcagctcactgcagtcagtgagggaggagttctgagtgaatccagcagcactgccaacatcacggtggtggccagcgactctccctatggccgatttgccttttcacatgagcaacttcgagtgtcagaagcacagagggttaacatcacaatcatccgttccagtggagattttggccatgtgcgactctggtacaagacgatgagcgggacagcggaagcaggcttggattttgttcctgcagcaggggagctcctctttgaagcaggggagatgaggaaaagtctgcatgttgaaatccttgatgatgactatcctgaaggcccagaggaattttctctaacaattacaaaggtggaactccagggaagagggtatgattttaccattcaagaaaatggacttcagatagatcaacctcctgaaataggaaacatctccattgttcgcatcataataatgaaaaatgataacgcagaaggcatcattgaatttgacccaaagtatactgccttcgaagtggaggaagatgttgggctgatcatgatcccagtggtgaggctacatggaacttatggctatgtgacagctgatttcatctctcagagctcctctgccagtcccggaggtgttgattacattttgcatggcagtacagtcacctttcagcatgggcaaaacttaagttttataaatatctccatcattgatgacaatgaaagtgaatttgaggagcccattgaaattctactcactggagctactggaggagcggtccttgggcgccacctagtgagcagaatcataatagctaagagtgactctccctttggagttataaggtttctcaatcaaagcaaaatttctattgctaatcccaattccacaatgattttatcactggtgctggagcggactggaggactcttgggagagattcaggtgaactgggagacagtaggacccaactctcaagaagccttactgccacagaatagagacattgcagacccagtgagcgggttgttctattttggagaaggagaaggaggagtgagaaccataattctgacaatctatcctcatgaagaaattgaagttgaagagacattcattattaaacttcatcttgtgaaaggagaagctaaattagactccagagctaaagatgttacattaaccatacaagagtttggtgacccaaatggagttgttcagtttgctcctgaaactttgtctaagaagacttattcagagcctctggctctggaagggcccctgctcattaccttctttgtcagaagagtcaagggcacctttggagagattatggtttactgggaattaagtagtgagtttgacattactgaagactttctttccaccagtggatttttcaccattgctgatggagagagtgaagctagctttgatgttcatttgctaccagatgaggtacctgagatagaggaagattatgtgatccagcttgtttctgtagagggaggagccgaactggatctggagaagagtatcacatggttctctgtttatgcaaatgatgacccacatggagtatttgccctgtattcggatcgccagtcaatacttattgggcagaaccttattagatccatccaaattaacataacccggcttgctggaacatttggagatgtggctgttgggcttcgaatatcatcggatcataaagaacagccgattgttaccgaaaatgcagagaggcagctggtggtcaaagatggtgccacatataaagtggacgtggtgccaataaagaatcaggtcttcctatcactgggctctaatttcactttgcaactggtgactgtgatgcttgtcggtggacgtttctatggaatgccaacaattcttcaggaagcaaaatctgctgtccttccagtctctgagaaagctgccaattctcaggtcggatttgaatccactgcttttcaactcatgaacatcactgctggcacaagccacgttatgatttctaggagaggcacatatggagctctctcggttgcctggaccactggatatgctcctgggttagaaattcctgaattcattgttgttggcaacatgaccccaacactggggagcctttcattttcccacggtgaacaaaggaaaggagttttcctgtggacgtttcctagccctggttggccagaggcctttgttcttcacctatcaggagtgcagagcagtgctcctggcggagctcaactccgatcaggtttcattgttgctgaaattgaaccaatgggcgtcttccaattttccactagctcaagaaatatcatagtgtcagaagatacacagatgatcagattacatgtacaaagactatttgggttccacagcgatcttattaaagtttcttatcagaccactgcaggaagcgccaagccactggaagattttgagcctgttcagaatggggaactgttttttcaaaaattccaaactgaggttgattttgaaataaccattattaatgatcagctttctgagatagaagaatttttttacattaaccttacttcagtagaaattaggggattacaaaagtttgatgttaattggagcccacgcctgaatctagatttcagtgttgcagtgattacaatattggataatgatgacctggcaggaatggatatttccttccccgagacaactgtggctgtagcagttgacacaactctcattcctgtagaaactgaatccaccacatacctcagcacaagcaagacgactaccattctgcagccaaccaacgtggttgccattgttactgaggcaactggtgtatctgccatccctgagaaacttgtcacccttcatggcacacctgctgtgtctgaaaagcctgatgtggccactgtaactgccaatgtttccattcatggaacattcagccttgggccatccattgtttatattgaagaggagatgaagaatggcacattcaacactgcagaagttcttatccgaagaactggtgggtttactggcaatgtcagcataacagttaaaactttcggtgaaagatgtgctcagatggaaccaaatgcattgccctttcgtggtatctatgggatttccaacctaacatgggcagttgaagaagaagactttgaagaacaaactcttacccttatattcctagatggagaaagagaacgtaaagtatcagttcaaattttggatgatgatgagcctgaggggcaggaattcttctacgtgtttctcacaaaccctcaagggggagcacagattgtggaggagaaggatgatactggatttgcagcttttgccatggttattattacagggagtgaccttcacaatggcatcataggattcagtgaggagtcccagagtggactagaactcagggaaggagctgttatgagaagattgcaccttattgtcacaagacagccaaacagggcctttgaagatgtcaaggtcttttggcgagtcacacttaacaaaacagtcgtcgtgctccagaaggatggggtaaacctggtggaggaacttcagtctgtgtcagggaccacaacctgtacaatgggtcaaacaaaatgctttatcagcattgaactcaaaccagaaaaggtaccacaggttgaagtgtatttttttgtggaactatatgaagctactgctggagcagcaataaacaacagtgccagattcgcacagattaaaatcttagaaagtgatgaatctcaaagccttgtgtatttttctgtgggttctcggctggcagtggctcacaagaaggccactttaatcagtctgcaggtggccagagattctgggacaggactaatgatgtctgttaactttagtacccaggagttgaggagtgctgaaacaattggtcgtaccatcatatctccagctatttctggaaaggattttgtgataactgaaggcacattggtctttgaacctggccagagaagcactgtattggatgtcatcctaacgccagagacaggatctttaaattcatttcctaaacgcttccagattgtcctttttgacccaaaaggtggtgccagaattgataaagtgtatgggactgccaacatcactcttgtctcagatgcagattcgcaggccatttgggggcttgcagatcagctacatcagcctgtgaatgatgatattctcaacagagtgctccataccatcagcatgaaagtggccacagaaaacacagatgaacaactcagtgccatgatgcatttaatagaaaagataactactgaaggaaaaattcaagctttcagtgttgccagccgaactcttttctatgagattctttgttctcttattaacccaaagcgcaaggacactaggggattcagtcactttgctgaagtgactgagaattttgccttttctctgctgactaatgttacttgcggctctcctggtgaaaaaagcaaaaccatccttgatagttgcccatatttgtcaatattggctcttcactggtatcctcagcaaatcaatggacacaagtttgaaggaaaggaaggagattacattcgaattccagagaggctactggatgtccaggatgcagaaataatggctgggaaaagtacatgtaaattagtccagtttacagagtatagcagccaacagtggtttataagtggaaacaatcttcctaccctaaaaaataaggtattatctttgagtgtgaaaggtcagagttcacaactcctgactaatgacaatgaggttctctacaggatttatgctgctgagcctagaattattcctcagacatctctgtgtctcctttggaatcaggctgctgcaagctggttgtctgacagtcagttttgcaaagtggttgaggaaactgcagactatgtggaatgtgcctgttcacacatgtctgtgtatgctgtctatgctcggactgacaacttgtcttcatacaatgaagccttcttcacttctggatttatatgtatctcaggtctttgcttggctgttctttcccatatcttctgtgccaggtactccatgtttgcagctaaacttctgactcacatgatggcagccagcttaggtacacagattctgtttctggcgtctgcatacgcaagtccccaactcgctgaggagagctgttcagctatggctgctgtcacacattacctgtatctttgccagtttagctggatgctcattcagtctgtgaatttctggtacgtgctggtgatgaatgatgagcacacagagaggcgatatctgctgtttttccttctgagttggggactaccagcttttgtggtgattctcctcatagttattttgaaaggaatctatcatcagagcatgtcacagatctatggactcattcatggtgacctgtgttttattccaaacgtctatgctgctttgttcactgcagctcttgttcctttgacgtgcctcgtggtggtgttcgtggtgttcatccatgcctaccaggtgaagccacagtggaaagcatatgatgatgtcttcagaggaaggacaaatgctgcagaaattccactgattttatatctctttgctctgatttccgtgacatggctttggggaggactacacatggcctacagacacttctggatgttggttctctttgtcattttcaacagtctgcagggactttatgttttcatggtttatttcattttacacaaccaaatgtgttgccctatgaaggccagttacactgtggaaatgaatgggcatcctggacccagcacagcctttttcacgcccgggagtggaatgcctcctgctggaggggaaatcagcaagtccacccagaatctcatcggtgctatggaggaggtgccacctgactgggagagagcatccttccaacagggcagtcaggccagccctgatttaaagccaagtccacaaaatggagccacgttcccgtcctctggaggatatggccaggggtcactgatagccgatgaggagtcccaggagtttgatgatttaatatttgcattaaaaactggtgctggtctcagtgtcagtgataatgaatctggtcaaggcagccaggaggggggcaccttgactgactcccagatcgtggagctcaggaggatacccatcgccgacactcacctgtag

SEQ ID NO: 471 - DNA, 1272 bp, Homo sapiens
  source 1..1272: mol_type = genomic DNA
atggcaatggtagttagcagctggcgagatccgcaggacgacgtggccgggggcaaccccggcggccccaaccccgcagcgcaggcggcccgcggcggcggcggcggcgccggcgagcagcagcagcaggcgggctcgggcgcgccgcacacgccgcagaccccgggccagcccggagcgcccgccacccccggcacggcgggggacaagggccagggcccgcccggttcgggccagagccagcagcacatcgagtgcgtggtgtgcggggacaagtcgagcggcaagcactacggccaattcacctgcgagggctgcaaaagtttcttcaagaggagcgtccgcaggaacttaacttacacatgccgtgccaacaggaactgtcccatcgaccagcaccaccgcaaccagtgccaatactgccgcctcaagaagtgcctcaaagtgggcatgaggcgggaagcggttcagcgaggaagaatgcctccaacccagcccaatccaggccagtacgcactcaccaacggggaccccctcaacggccactgctacctgtccggctacatctcgctgctgctgcgcgccgagccctaccccacgtcgcgctacggcagccagtgcatgcagcccaacaacattatgggcatcgagaacatctgcgagctggccgcgcgcctgctcttcagcgccgtcgagtgggcccgcaacatccccttcttcccggatctgcagatcaccgaccaggtgtccctgctacgcctcacctggagcgagctgttcgtgctcaacgcggcccagtgctctatgccgctgcacgtggcgccgttgctggccgccgccggcctgcatgcctcgcccatgtctgccgaccgcgtcgtggccttcatggaccacatccgcatcttccaggagcaggtggagaagctcaaggcgctacacgtcgactcagccgagtacagctgcctcaaagccatcgtgctgttcacgtcagacgcctgtggcctgtcggatgcggcccacatcgagagcctgcaggagaagtcgcagtgcgcactggaggagtacgtgaggagccagtaccccaaccagcccagccgttttggcaaactgctgctgcgactgccctcgctgcgcaccgtgtcctcctccgtcatcgagcagctcttcttcgtccgtttggtaggtaaaacccccatcgaaactctcatccgcgatatgttactgtctgggagcagcttcaactggccttacatgtccatccagtgctcctag

SEQ ID NO: 472 - DNA, 1257 bp, Homo sapiens
  source 1..1257: mol_type = genomic DNA
atgcatccgcggcgcccggacggatttgatggcttgggctaccggggtggtgcccgggacgagcagggctttggcggcgccttccctgcaaggtccttcagcaccgggtcggacctgggccactgggtgacgactcccccagatatccccggcagccgcaacctgcactggggcgagaagagcccgccctacggcgtgcccaccacctccaccccgtacgaaggccccacggaggaacccttttccagtggcggcggcggcagtgtgcaggggcagagcagtgaacagctgaatagatttgctggatttggtattggacttgcaagtctctttacagaaaatgtattggcacatccttgcattgttctacgccgccaatgtcaggttaattaccatgctcagcattaccatctcactccatttacagtcatcaatattatgtacagtttcaacaaaactcagggacctagagccctgtggaaaggaatgggaagtacatttattgtccagggagtcacacttggagcagaaggcataattagtgaatttacacctttgccaagggaggttttacataaatggagtcctaaacaaataggagaacaccttctactgaaatccctaacttacgtggtggcaatgcctttttattcagcaagtctgattgaaacagtgcagagtgagataattcgagataatactggcattttggagtgtgttaaagaaggaattggaagagtgataggcatgggagtgcctcatagcaaacgacttcttccgcttctttccttgatcttccctacggtgcttcatggagttcttcattacatcatcagctcagttattcagaagtttgtcctactaattctaaagagaaagacttacaatagccacctagctgagagcactagccctgtgcagagtatgttggatgcttattttccagaacttattgctaactttgctgccagtctttgttctgacgttatactttacccattggaaacagttttgcaccgccttcacattcaaggaacacgcacaataattgacaatacagaccttggctatgaagtgcttccaattaatacacaatatgagggaatgagagactgtatcaataccataaggcaggaggaaggagtgtttggtttttataaagggtttggtgctgttataatacagtacacactgcatgcagctgttttacagattaccaaaattatttactctacacttcttcaaaataacatttga

SEQ ID NO: 473 - DNA, 2721 bp, Homo sapiens
  source 1..2721: mol_type = genomic DNA
atgactgctgtccatgcaggcaacataaacttcaagtgggatcctaaaagtctagagatcaggactctggcagttgagagactgttggagcctcttgttacacaggttacaacccttgtaaacaccaatagtaaagggccctctaataagaagagaggtcgttctaagaaggcccatgttttggctgcatctgttgaacaagcaactgagaatttcttggagaagggggataaaattgcgaaggagagccagtttctcaaggaggagcttgtggctgctgtagaagatgttcgaaaacaaggtgatttgatgaaggctgctgcaggagagttcgcagatgatccctgctcttctgtgaagcgaggcaacatggttcgggcagctcgagctttgctctctgctgttacccggttgctgattttggctgacatggcagatgtctacaaattacttgttcagctgaaagttgtggaagatggtatcttgaagttgaggaatgctggcaatgaacaagacttaggaatccagtataaagccctaaaacctgaagtggataagctgaacattatggcagccaaaagacaacaggaattgaaagatgttggccatcgtgatcagatggctgcagctagaggaatcctgcagaagaacgttccgatcctctatactgcatcccaggcatgcctacagcaccctgatgtcgcagcctataaggccaacagggacctgatatacaagcagctgcagcaggcggtcacaggcatttccaatgcagcccaggccactgcctcagacgatgcctcacagcaccagggtggaggaggaggagaactggcatatgcactcaataactttgacaaacaaatcattgtggaccccttgagcttcagcgaggagcgctttaggccttccctggaggagcgtctggaaagcatcattagtggggctgccttgatggccgactcgtcctgcacgcgtgatgaccgtcgtgagcgaattgtggcagagtgtaatgctgtccgccaggccctgcaggacctgctttcggagtacatgggcaatgctggacgtaaagaaagaagtgatgcactcaattctgcaatagataaaatgaccaagaagaccagggacttgcgtagacagctccgcaaagctgtcatggaccacgtttcagattctttcctggaaaccaatgttccacttttggtattgattgaagctgcaaagaatggaaatgagaaagaagttaaggagtatgcccaagttttccgtgaacatgccaacaaattgattgaggttgccaacttggcctgttccatctcaaataatgaagaaggtgtaaagcttgttcgaatgtctgcaagccagttagaagccctctgtcctcaggttattaatgctgcactggctttagcagcaaaaccacagagtaaactggcccaagagaacatggatctttttaaagaacaatgggaaaaacaagtccgtgttctcacagatgctgtcgatgacattacttccattgatgacttcttggctgtctcagagaatcacattttggaagatgtgaacaaatgtgtcattgctctccaagagaaggatgtggatggcctggaccgcacagctggtgcaattcgaggccgggcagcccgggtcattcacgtagtcacctcagagatggacaactatgagccaggagtctacacagagaaggttctggaagccactaagctgctctccaacacagtcatgccacgttttactgagcaagtagaagcagccgtggaagccctcagctcggaccctgcccagcccatggatgagaatgagtttatcgatgcttcccgcctggtatatgatggcatccgggacatcaggaaagcagtgctgatgataaggacccctgaggagttggatgactctgactttgagacagaagattttgatgtcagaagcaggacgagcgtccagacagaagacgatcagctgatagctggccagagtgcccgggcgatcatggctcagcttccccaggagcaaaaagcgaagattgcggaacaggtggccagcttccaggaagaaaagagcaagctggatgctgaagtgtccaaatgggacgacagtggcaatgacatcattgtgctggccaagcagatgtgcatgattatgatggagatgacagactttacccgaggtaaaggaccactcaaaaatacatcggatgtcatcagtgctgccaagaaaattgctgaggcaggatccaggatggacaagcttggccgcaccattgcagaccattgccccgactcggcttgcaagcaggacctgctggcctacctgcaacgcatcgccctctactgccaccagctgaacatctgcagcaaggtcaaggccgaggtgcagaatctcggcggggagcttgttgtctctggggtggacagcgccatgtccctgatccaggcagccaagaacttgatgaatgctgtggtgcagacagtgaaggcatcctacgtcgcctctaccaaataccaaaagtcacagggtatggcttccctcaaccttcctgctgtgtcatggaagatgaaggcaccagagaaaaagccattggtgaagagagagaaacaggatgagacacagaccaagattaaacgggcatctcagaagaagcacgtgaacccggtgcaggccctcagcgagttcaaagctatggacagcatctaa

SEQ ID NO: 474 - DNA, 1530 bp, Homo sapiens
  source 1..1530: mol_type = genomic DNA
atggcagagcgtgcggcgctggaggagctggtgaaacttcagggagagcgcgtgcgaggcctcaagcagcagaaggccagcgccgagctgatcgaggaggaggtggcgaaactcctgaaactgaaggcacagctgggtcctgatgaaagcaaacagaaatttgtgctcaaaacccccaagggcacaagagactatagtccccggcagatggcagttcgcgagaaggtgtttgacgtaatcatccgttgcttcaagcgccacggtgcagaagtcattgatacacctgtatttgaactaaaggaaacactgatgggaaagtatggggaagactccaagcttatctatgacctgaaggaccagggcggggagctcctgtcccttcgctatgacctcactgttccttttgctcggtatttggcaatgaataaactgaccaacattaaacgctaccacatagcaaaggtatatcggcgggataacccagccatgacccgtggccgataccgggaattctaccagtgtgattttgacattgctgggaactttgatcccatgatccctgatgcagagtgcctgaagatcatgtgcgagatcctgagttcacttcagataggcgacttcctggtcaaggtaaacgatcgacgcattctagatgggatgtttgctatctgtggtgtttctgacagcaagttccgtaccatctgctcctcagtagacaagctggacaaggtgtcctgggaagaggtgaagaatgagatggtgggagagaagggccttgcacctgaggtggctgaccgcattggggactatgtccagcaacatggtggggtatccctggtggaacagctgctccaggatcctaaactatcccaaaacaagcaggccttggagggcctgggagacctgaagttgctctttgagtacctgaccctatttggcattgatgacaaaatctcctttgacctgagccttgctcgagggctggattactacactggggtgatctatgaggcagtgctgctacagaccccagcccaggcaggggaagagcccctgggtgtgggcagtgtggctgctggaggacgctatgatgggctagtgggcatgttcgaccccaaagggcgcaaggtgccatgtgtggggctcagcattggggtggagcggattttctccatcgtggaacagagactagaggctttggaggagaagatacggaccacggagacacaggtgcttgtggcatctgcacagaagaagctgctagaggaaagactaaagcttgtctcagaactgtgggatgctgggatcaaggctgagctgctgtacaagaagaacccaaagctactgaaccagttacagtactgtgaggaggcaggcatcccactggtggctatcatcggcgagcaggaactcaaggatggggtcatcaagctccgttcagtgacgagcagggaagaggtggatgtccgaagagaagaccttgtggaggaaatcaaaaggagaacaggccagcccctctgcatctgctga

SEQ ID NO: 475 - DNA, 2583 bp, Homo sapiens
  source 1..2583: mol_type = genomic DNA
atgggcgaggtgacagcagaggaggtggagaagttcctggactcgaatattggctttgccaaacagtactacaacctccactaccgggccaagctcatctccgacctccttggggccaaggaggctgccgtggacttcagcaactaccactccccgagcagcatggaggagagcgaaatcatctttgatctcctgcgggactttcaggagaatttacagacagagaaatgcatcttcaatgtcatgaagaagctgtgcttcctcctgcaggcagaccgcatgagcctgttcatgtaccggacccgcaatggcatcgcagagctggccaccaggcttttcaatgtccacaaggatgctgtcctcgaggactgcctggtgatgcccgaccaagagatcgtcttccctttggacatgggcatcgtgggccatgtcgcacactctaagaagattgctaacgtccccaacacagaggaggatgagcatttctgtgactttgtggacatcctcacagagtacaagaccaagaacatcttggcttcccccataatgaatgggaaggatgtggtggccataatcatggctgtgaataaagtggatggatcccacttcaccaagagagatgaagagattcttctcaagtacctcaattttgcaaatctaatcatgaaggtgtaccacctgagttacctgcacaactgtgaaactcgacgtggccagatactgctgtggtctgggagcaaagtctttgaagaacttacggacatcgaacgacagttccacaaagccctgtacacagtccgtgctttcctcaactgtgacagatactctgtgggtctcttagacatgaccaagcagaaggaattttttgatgtgtggccggttctgatgggtgaagttccaccttactctggtcccaggactccggatggaagagaaattaacttttacaaggtcattgactacatcctgcatggcaaagaggacatcaaagtcatcccgaatccacctcctgaccattgggctttagtaagcggtctcccagcttatgttgcccagaatggcctgatttgcaacatcatgaatgcgcctgcggaggacttttttgcatttcagaaagaacctctggatgagtctggatggatgattaaaaatgtgctttcaatgccgattgtgaacaagaaggaagaaattgttggagtggccacattttacaatcgtaaagatgggaagccctttgatgaaatggatgagacgctcatggagtctttgactcaatttctgggctggtctgtcttaaatcctgacacctatgagtcaatgaataaacttgaaaataggaaggatattttccaggacatagtaaaatatcatgtgaagtgtgacaatgaagaaattcagaaaatcttgaaaaccagagaggtgtatgggaaggagccatgggagtgtgaggaagaggagctggctgagatcctgcaagcggagctgccagatgcagataaatacgaaattaataaatttcacttcagtgacttacccctaacagaactggagctggtaaaatgtggaatacagatgtattatgagctcaaagtggtggataaatttcacattccacaagaggccctggtgcggttcatgtactccctgagtaagggctaccgcaagatcacctaccacaactggcggcacggcttcaacgtggggcagaccatgttctccctgctggtgacgggaaagctgaagcgctacttcacggacctagaggccttggccatggtcactgctgctttctgccatgacattgaccacagaggcaccaataacctctaccagatgaaatcccagaacccactggccaagctccatgggtcctctatcttggaaagacaccacttggagtttggcaaaacactgctcagagacgagagcctgaatatctttcaaaacctcaatcgtcgacagcatgagcatgccatccacatgatggacattgcaatcattgccacagacctcgccctgtatttcaagaagaggacgatgttccaaaagatcgtggatcagtctaagacatatgagagtgaacaggagtggacacagtacatgatgctggagcagacacggaaggaaatcgttatggccatgatgatgaccgcctgtgatctctcagccatcaccaaaccctgggaggtgcagagccaggtagctctgctggtggctgctgaattctgggaacaaggtgacctggagcgcacggtgctgcaacagaatcccattcccatgatggacagaaacaaagcagatgaactccctaagcttcaagtcggcttcattgactttgtttgcaccttcgtctacaaggaattctcccgtttccacgaggagatcaccccaatgttggacgggatcaccaacaatcgcaaggagtggaaggcgcttgctgatgagtacgatgccaagatgaaggtgcaggaggagaagaagcagaaacagcagtcggccaagtcagcagccgcaggaaatcagccggggggaaaccccagcccagggggtgcaactacatccaagtcctgctgcatccagtaa

SEQ ID NO: 476 - DNA, 2634 bp, Homo sapiens
  source 1..2634: mol_type = genomic DNA
atggcgcggccccggagagcccgggagccgctgctcgtggcgctgctgccgctggcgtggctggcgcaggcgggcctggcgcgcgcggcgggctctgtgcgcctggcgggcggcctgacgctgggcggcctgttcccggtgcacgcgcggggcgcggcgggccgggcgtgcgggcagctgaagaaggagcagggcgtgcaccggctggaggccatgctgtacgcgctggaccgcgtcaacgccgaccccgagctgctgcccggcgtgcgcctgggcgcgcggctgctggacacctgctcgcgggacacctacgcgctggagcaggcgctgagcttcgtgcaggcgctgatccgcggccgcggcgacggcgacgaggtgggcgtgcgctgcccgggaggcgtccctccgctgcgccccgcgccccccgagcgcgtcgtggccgtcgtgggcgcctcggccagctccgtctccatcatggtcgccaacgtgctgcgcctgtttgcgataccccagatcagctatgcctccacagccccggagctcagcgactccacacgctatgacttcttctcccgggtggtgccacccgactcctaccaggcgcaggccatggtggacatcgtgagggcactgggatggaactatgtgtccacgctggcctccgagggcaactatggcgaaagtggggttgaggccttcgttcagatctcccgagaggctgggggggtctgtattgcccagtctatcaagattcccagggaaccaaagccaggagagttcagcaaggtgatcaggagactcatggagacgcccaacgcccggggcatcatcatctttgccaatgaggatgacatcaggcgggtcctggaggcagctcgccaggccaacctgaccggccacttcctgtgggtcggctcagacagctggggagccaagacctcacccatcttgagcctggaggacgtggccgttggggccatcaccatcctgcccaaaagggcctccatcgacggatttgaccagtacttcatgactcgatccctggagaacaaccgcaggaacatctggttcgccgagttctgggaagagaattttaactgcaaactgaccagctcaggtacccagtcagacgattccacccgcaaatgcacaggcgaggaacgcatcggccgggactccacctacgagcaggagggcaaggtgcagtttgtgattgatgcggtgtacgccattgcccacgccctccacagcatgcaccaggcgctctgccctgggcacacaggcctgtgcccggcgatggaacccactgatgggcggatgcttctgcagtacattcgagctgtccgcttcaatggcagcgcaggaacccctgtgatgttcaacgagaacggagatgcgcccgggcggtacgacatcttccagtaccaggcgaccaatggcagtgccagcagtggcgggtaccaggcagtgggccagtgggcagagaccctcagactggatgtggaggccctgcagtggtctggcgacccccacgaggtgccctcgtctctgtgcagcctgccctgcgggccgggggagcggaagaagatggtgaagggcgtcccctgctgttggcactgcgaggcctgtgacgggtaccgcttccaggtggacgagttcacatgcgaggcctgtcctggggacatgaggcccacgcccaaccacacgggctgccgccccacacctgtggtgcgcctgagctggtcctccccctgggcagccccgccgctcctcctggccgtgctgggcatcgtggccactaccacggtggtggccaccttcgtgcggtacaacaacacgcccatcgtccgggcctcgggccgagagctcagctacgtcctcctcaccggcatcttcctcatctacgccatcaccttcctcatggtggctgagcctggggccgcggtctgtgccgcccgcaggctcttcctgggcctgggcacgaccctcagctactctgccctgctcaccaagaccaaccgtatctaccgcatctttgagcagggcaagcgctcggtcacaccccctcccttcatcagccccacctcacagctggtcatcaccttcagcctcacctccctgcaggtggtggggatgatagcatggctgggggcccggcccccacacagcgtgattgactatgaggaacagcggacggtggaccccgagcaggccagaggggtgctcaagtgcgacatgtcggatctgtctctcatcggctgcctgggctacagcctcctgctcatggtcacgtgcacagtgtacgccatcaaggcccgtggcgtgcccgagaccttcaacgaggccaagcccatcggcttcaccatgtacaccacctgcatcatctggctggcattcgtgcccatcttctttggcactgcccagtcagctgaaaagatctacatccagacaaccacgctaaccgtgtccttgagcctgagtgcctcggtgtccctcggcatgctctacgtacccaaaacctacgtcatcctcttccatccagagcagaatgtgcagaagcgaaagcggagcctcaaggccacctccacggtggcagccccacccaagggcgaggatgcagaggcccacaagtag

SEQ ID NO: 477 - DNA, 1872 bp, Homo sapiens
  source 1..1872: mol_type = genomic DNA
atgaaccgatacacaaccatgagacagttgggggacggcacgtatgggagtgtgcttatgggcaagagtaatgaatccggggagctggtggccatcaaaaggatgaagagaaagttctattcttgggatgaatgcatgaacttgagagaagttaagtctctgaagaaacttaatcatgccaatgttattaaattgaaagaagttatcagagaaaatgaccatctttattttatatttgaatatatgaaagaaaacctctatcaattaatgaaagacagaaacaagttgttccctgaatcagtcatcagaaatattatgtatcaaatattgcaagggctggcttttatccataaacatggcttttttcatagggacatgaaaccagaaaacttgctttgtatgggtccagagcttgtgaaaattgctgattttggacttgcaagagaattaaggtcacagccaccatacactgattatgtatctaccagatggtatcgtgcccctgaagttttactgagatcttcagtttatagttctcccattgatgtgtgggctgttggaagtatcatggctgaactctatatgttaaggccacttttcccagggacaagtgaggtcgatgaaatctttaaaatttgccaagttttagggactcccaaaaaaagtgactggccagaaggataccagctggcatcctctatgaacttccgttttccccagtgtgttcctataaacttaaaaactcttattcccaatgccagtaatgaagctattcagctcatgaccgaaatgttgaattgggatccaaagaaacgaccgacagcaagccaggcattgaaacacccatattttcaagttggtcaggtattaggcccttcgtcaaatcatctggaatcaaaacagtctttaaataagcagctgcaaccattagaatcaaagccatctttagttgaggtagagcctaagcctctgccggatataatcgatcaggttgttggacaaccccagccaaaaactagccagcagccactgcagcccattcagccgccacagaacctgagcgtccagcaacctccaaagcaacagagtcaggagaaaccgccacaaacgctattcccgagcatcgtcaaaaacatgccaactaagccaaatggcacactgagtcataaaagtggtaggaggcgttggggtcagactatcttcaagtctggagatagctgggaagagttggaggactatgatttcggagcctcccattccaagaagccaagcatgggtgtttttaaagaaaaaaggaaaaaagattctccatttcggcttccagagccagtaccctcaggctccaaccactcgacaggggaaaacaagagcttacctgctgttacttccctaaaatctgattccgaattgtcaactgctccaacctctaaacagtactacttgaaacaatcaagatatcttccaggtgtgaatcccaagaaggtgtccttgatagccagtggaaaggaaataaacccccacacttggagcaaccagttattccccaagtcactgggacccgttggggcagaacttgctttcaaaaggagcaatgcaggaaatcttggaagttatgctacttacaatcagtcaggatatattccttcctttctcaaaaaagaagtgcagtcagctggccagaggatccacttagcacctctcaatgcaacggcttcagaatatacctggaacacaaaaactggtcgggggcagttttcaggacgtacttataatcctacagcaaaaaacctaaatattgtgaaccgtgcacagcccattccctcagtgcatgggaggacagactgggtggccaagtatggaggccaccggtag

SEQ ID NO: 478 - DNA, 2259 bp, Homo sapiens
  source 1..2259: mol_type = genomic DNA
atgggcccactgatggttcttttttgcctgctgttcctgtacccaggtctggcagactcggctccctcctgccctcagaacgtgaatatctcgggtggcaccttcaccctcagccatggctgggctcctgggagccttctcacctactcctgcccccagggcctgtacccatccccagcatcacggctgtgcaagagcagcggacagtggcagaccccaggagccacccggtctctgtctaaggcggtctgcaaacctgtgcgctgtccagcccctgtctcctttgagaatggcatttataccccacggctggggtcctatcccgtgggtggcaatgtgagcttcgagtgtgaggatggcttcatattgcggggctcgcctgtgcgtcagtgtcgccccaacggcatgtgggatggagaaacagctgtgtgtgataatggggctggccactgccccaacccaggcatttcactgggcgcagtgcggacaggcttccgctttggtcatggggacaaggtccgctatcgctgctcctcgaatcttgtgctcacggggtcttcggagcgggagtgccagggcaacggggtctggagtggaacggagcccatctgccgccaaccctactcttatgacttccctgaggacgtggcccctgccctgggcacttccttctcccacatgcttggggccaccaatcccacccagaagacaaaggaaagcctgggccgtaaaatccaaatccagcgctctggtcatctgaacctctacctgctcctggactgttcgcagagtgtgtcggaaaatgactttctcatcttcaaggagagcgcctccctcatggtggacaggatcttcagctttgagatcaatgtgagcgttgccattatcacctttgcctcagagcccaaagtcctcatgtctgtcctgaacgacaactcccgggatatgactgaggtgatcagcagcctggaaaatgccaactataaagatcatgaaaatggaactgggactaacacctatgcggccttaaacagtgtctatctcatgatgaacaaccaaatgcgactcctcggcatggaaacgatggcctggcaggaaatccgacatgccatcatccttctgacagatggaaagtccaatatgggtggctctcccaagacagctgttgaccatatcagagagatcctgaacatcaaccagaagaggaatgactatctggacatctatgccatcggggtgggcaagctggatgtggactggagagaactgaatgagctagggtccaagaaggatggtgagaggcatgccttcattctgcaggacacaaaggctctgcaccaggtctttgaacatatgctggatgtctccaagctcacagacaccatctgcggggtggggaacatgtcagcaaacgcctctgaccaggagaggacaccctggcatgtcactattaagcccaagagccaagagacctgccggggggccctcatctccgaccaatgggtcctgacagcagctcattgcttccgcgatggcaacgaccactccctgtggagggtcaatgtgggagaccccaaatcccagtggggcaaagaattccttattgagaaggcggtgatctccccagggtttgatgtctttgccaaaaagaaccagggaatcctggagttctatggtgatgacatagctctgctgaagctggcccagaaagtaaagatgtccacccatgccaggcccatctgccttccctgcacgatggaggccaatctggctctgcggagacctcaaggcagcacctgtagggaccatgagaatgaactgctgaacaaacagagtgttcctgctcattttgtcgccttgaatgggagcaaactgaacattaaccttaagatgggagtggagtggacaagctgtgccgaggttgtctcccaagaaaaaaccatgttccccaacttgacagatgtcagggaggtggtgacagaccagttcctatgcagtgggacccaggaggatgagagtccctgcaagggagaatctgggggagcagttttccttgagcggagattcaggttttttcaggtgggtctggtgagctggggtctttacaacccctgccttggctctgctgacaaaaactcccgcaaaagggcccctcgtagcaaggtcccgccgccacgagactttcacatcaatctcttccgcatgcagccctggctgaggcagcacctgggggatgtcctgaattttttacccctctag

SEQ ID NO: 479 - DNA, 2295 bp, Homo sapiens
  source 1..2295: mol_type = genomic DNA
atggggagcaatctcagcccccaactctgcctgatgccctttatcttgggcctcttgtctggaggtgtgaccaccactccatggtctttggcccggccccagggatcctgctctctggagggggtagagatcaaaggcggctccttccgacttctccaagagggccaggcactggagtacgtgtgtccttctggcttctacccgtaccctgtgcagacacgtacctgcagatctacggggtcctggagcaccctgaagactcaagaccaaaagactgtcaggaaggcagagtgcagagcaatccactgtccaagaccacacgacttcgagaacggggaatactggccccggtctccctactacaatgtgagtgatgagatctctttccactgctatgacggttacactctccggggctctgccaatcgcacctgccaagtgaatggccgatggagtgggcagacagcgatctgtgacaacggagcggggtactgctccaacccgggcatccccattggcacaaggaaggtgggcagccagtaccgccttgaagacagcgtcacctaccactgcagccgggggcttaccctgcgtggctcccagcggcgaacgtgtcaggaaggtggctcttggagcgggacggagccttcctgccaagactccttcatgtacgacacccctcaagaggtggccgaagctttcctgtcttccctgacagagaccatagaaggagtcgatgctgaggatgggcacggcccaggggaacaacagaagcggaagatcgtcctggacccttcaggctccatgaacatctacctggtgctagatggatcagacagcattggggccagcaacttcacaggagccaaaaagtgtctagtcaacttaattgagaaggtggcaagttatggtgtgaagccaagatatggtctagtgacatatgccacataccccaaaatttgggtcaaagtgtctgaagcagacagcagtaatgcagactgggtcacgaagcagctcaatgaaatcaattatgaagaccacaagttgaagtcagggactaacaccaagaaggccctccaggcagtgtacagcatgatgagctggccagatgacgtccctcctgaaggctggaaccgcacccgccatgtcatcatcctcatgactgatggattgcacaacatgggcggggacccaattactgtcattgatgagatccgggacttgctatacattggcaaggatcgcaaaaacccaagggaggattatctggatgtctatgtgtttggggtcgggcctttggtgaaccaagtgaacatcaatgctttggcttccaagaaagacaatgagcaacatgtgttcaaagtcaaggatatggaaaacctggaagatgttttctaccaaatgatcgatgaaagccagtctctgagtctctgtggcatggtttgggaacacaggaagggtaccgattaccacaagcaaccatggcaggccaagatctcagtcattcgcccttcaaagggacacgagagctgtatgggggctgtggtgtctgagtactttgtgctgacagcagcacattgtttcactgtggatgacaaggaacactcaatcaaggtcagcgtaggaggggagaagcgggacctggagatagaagtagtcctatttcaccccaactacaacattaatgggaaaaaagaagcaggaattcctgaattttatgactatgacgttgccctgatcaagctcaagaataagctgaaatatggccagactatcaggcccatttgtctcccctgcaccgagggaacaactcgagctttgaggcttcctccaactaccacttgccagcaacaaaaggaagagctgctccctgcacaggatatcaaagctctgtttgtgtctgaggaggagaaaaagctgactcggaaggaggtctacatcaagaatggggataagaaaggcagctgtgagagagatgctcaatatgccccaggctatgacaaagtcaaggacatctcagaggtggtcacccctcggttcctttgtactggaggagtgagtccctatgctgaccccaatacttgcagaggtgattctggcggccccttgatagttcacaagagaagtcgtttcattcaagttggtgtaatcagctggggagtagtggatgtctgcaaaaaccagaagcggcaaaagcaggtacctgctcacgcccgagactttcacatcaacctctttcaagtgctgccctggctgaaggagaaactccaagatgaggatttgggttttctataa

SEQ ID NO: 480 - DNA, 1629 bp, Homo sapiens
  source 1..1629: mol_type = genomic DNA
atgcctctgcgggatgaaaccctccgagaggtgtgggcctctgacagtgggcatgaagaagaaagcctgagcccggaggccccgcggcgccccaaacagcgacccgccccggcacagaggctaaggaagaagaggacggaggcccccgaatccccctgccccacgggatccaagccccggaagcccggagctgggcggacggggaggccgcgggaggagccttccccagacccagcccaggcccgggcgccgcagacggtctacgccaggttcctcagggaccccgaggccaagaagcgcgacccccgggaaacctttctggtagcccgtgccccagacgcggaggacgaggaggaggaggaagaggaggacgaggaggacgaggaagaggaggcagaggaaaagaaagagaaaatccttctgcctcccaagaagcccctgagagagaagagctccgcagacctgaaggagaggagggccaaggcccagggcccaaggggagacctgggaagccctgaccccccaccgaaacctctgcgtgttaggaataaggaagctccagcaggggaggggaccaagatgagaaagaccaagaagaaagggtctggggaggccgacaaggacccctcagggagcccagccagtgcgaggaagagcccagcagccatgtttctggttggggaaggcagtcctgacaagaaagccctgaagaagaaaggcactcccaaaggcgcgaggaaggaggaagaagaggaggaggaggcagctacggtgataaagaagagcaatcaaaagggcaaagccaaaggaaaaggcaaaaagaaagcgaaggaggagagggccccgtctccccccgtggaggtggacgaaccccgggagtttgtgctccggcctgccccccagggccgcacggtgcgctgccggctgacccgggacaaaaagggcatggatcgaggcatgtatccctcctacttcctgcacctggacacggagaagaaggtgttcctcttggctggcaggaaacgaaaacggagcaagacagccaattacctcatctccatcgaccctaccaatctgtcccgaggaggggagaatttcatcgggaagctgaggtccaacctcctggggaaccgcttcacggtctttgacaacgggcagaacccacagcgtgggtacagcactaatgtggcaagccttcggcaggagctggcagctgtgatctatgaaaccaacgtgctgggcttccgtggcccccggcgcatgaccgtcatcattcctggcatgagtgcggagaacgagagggtccccatccggccccgaaatgctagtgacggcctgctggtgcgctggcagaacaagacgctggagagcctcatagaactgcacaacaagccacctgtctggaacgatgacagtggctcctacaccctcaacttccaaggccgggtcacccaggcctcagtcaagaacttccagattgtccacgctgatgaccccgactatatcgtgctgcagttcggccgcgtggcggaggacgccttcaccctagactaccggtacccgctgtgcgccctgcaggccttcgccatcgccctctccagtttcgacgggaagctggcctgcgagtga

SEQ ID NO: 481 - DNA, 606 bp, Homo sapiens
  source 1..606: mol_type = genomic DNA
atgggcaacgtgatggagggaaagtcagtggaggagctgagcagcaccgagtgccaccagtggtacaagaagttcatgactgagtgcccctctggccaactcaccctctatgagttccgccagttcttcggcctcaagaacctgagcccgtcggccagccagtacgtggaacagatgtttgagacttttgacttcaacaaggacggctacattgatttcatggagtacgtggcagcgctcagcttggtcctcaaggggaaggtggaacagaagctccgctggtacttcaagctctatgatgtagatggcaacggctgcattgaccgcgatgagctgctcaccatcatccaggccattcgcgccattaacccctgcagcgataccaccatgactgcagaggagttcaccgatacagtgttctccaagattgacgtcaacggggatggggaactctccctggaagagtttatagagggcgtccagaaggaccagatgctcctggacacactgacacgaagcctggaccttacccgcatcgtgcgcaggctccagaatggcgagcaagacgaggagggggctgacgaggccgctgaggcagccggctga

SEQ ID NO: 482 - DNA, 603 bp, Homo sapiens
  source 1..603: mol_type = genomic DNA
atggggcaggagtttagctgggaggaggcggaggcagctggcgagatagatgtggcggagctccaggagtggtacaagaagtttgtgatggagtgccccagcggcacactctttatgcatgagtttaagcgcttcttcaaggtcacagacgatgaggaggcctcccagtatgtagagggcatgttccgagccttcgacaagaatggggacaacaccatcgacttcctggagtacgtggcagctctgaatctcgtgctgaggggcaccctggagcacaagctgaagtggacattcaagatctatgataaggatggcaatggctgcatcgaccgcctggagctactcaacattgtggagggaatttaccagctgaagaaagcctgccggcgagagctacaaactgagcaaggccagctgctcacacccgaggaggtcgtggacaggatcttcctcctggtggatgagaatggagatggccagctgtctctgaacgagtttgttgaaggtgcccgtcgggacaagtgggtgatgaagatgctgcagatggacatgaatcccagcagctggctcgctcagcagagacggaaaagtgccatgttctga

SEQ ID NO: 483 - DNA, 1041 bp, Homo sapiens
  source 1..1041: mol_type = genomic DNA
atggcgctactgaaagtcaagtttgaccagaagaagcgggtcaagttggcccaagggctctggctcatgaactggttctccgtgttggctggcatcatcatcttcagcctaggactgttcctgaagattgaactccgaaagaggagcgatgtgatgaataattctgagagccattttgtgcccaactcattgatagggatgggggtgctatcctgtgtcttcaactcgctggctgggaagatctgctacgacgccctggacccagccaagtatgccagatggaagccctggctgaagccgtacctggctatctgtgttctcttcaacatcatcctcttccttgtggctctctgctgctttctgcttcggggctcgctggagaacaccctgggccaagggctcaagaacggcatgaagtactaccgggacacagacacccctggcaggtgtttcatgaagaagaccatcgacatgctgcagatcgagttcaaatgctgcggcaacaacggttttcgggactggtttgagattcagtggatcagcaatcgctacctggacttttcctccaaagaagtcaaagatcgaatcaagagcaacgtggatgggcggtacctggtggacggcgtccctttcagctgctgcaatcctagctcgccacggccctgcatccagtatcagatcaccaacaactcagcacactacagttacgaccaccagacggaggagctcaacctgtgggtgcgtggctgcagggctgccctgctgagctactacagcagcctcatgaactccatgggtgtcgtcacgctcctcatttggctcttcgaggtgaccattacaattgggctgcgctacctacagacgtcgctggatggtgtgtccaaccccgaggaatctgagagcgagagccagggctggctgctggagaggagcgtgccggagacctggaaggcctttctggagagtgtgaagaagctgggcaagggcaaccaggtggaagccgagggcgcagacgcaggccaggccccagaggctggctga

SEQ ID NO: 484 - DNA, 2394 bp, Homo sapiens
  source 1..2394: mol_type = genomic DNA
atgtatttggaaactagaagagctatttttgttttttggatttttctccaagttcaaggaaccaaagatatctccattaacatataccattctgaaactaaagacatagacaatcccccaagaaatgaaacaactgaaagtactgaaaaaatgtacaaaatgtcaactatgagacgaatattcgatttggcaaagcatcgaacaaaaagatccgcatttttcccaacgggggttaaagtctgtccacaggaatccatgaaacagattttagacagtcttcaagcttattatagattgagagtgtgtcaggaagcagtatgggaagcatatcggatctttctggatcgcatccctgacacaggggaatatcaggactgggtcagcatctgccagcaggagaccttctgcctctttgacattggaaaaaacttcagcaattcccaggagcacctggatcttctccagcagagaataaaacagagaagtttccctgacagaaaagatgaaatatctgcagagaagacattgggagagcctggtgaaaccattgtcatttcaacagatgttgccaacgtctcacttgggcctttccctctcactcctgatgacaccctcctcaatgaaattctcgataatacactcaacgacaccaagatgcctacaacagaaagagaaacagaattcgctgtgttggaggagcagagggtggagctcagcgtctctctggtaaaccagaagttcaaggcagagctcgctgactcccagtccccatattaccaggagctagcaggaaagtcccaacttcagatgcaaaagatatttaagaaacttccaggattcaaaaaaatccatgtgttaggatttagaccaaagaaagaaaaagatggctcaagctccacagagatgcaacttacggccatctttaagagacacagtgcagaagcaaaaagccctgcaagtgacctcctgtcttttgattccaacaaaattgaaagtgaggaagtctatcatggaaccatggaggaggacaagcaaccagaaatctatctcacagctacagacctcaaaaggctgatcagcaaagcactagaggaagaacaatctttggatgtggggacaattcagttcactgatgaaattgctggatcactgccagcctttggtcctgacacccaatcagagctgcccacatcttttgctgttataacagaggatgctactttgagtccagaacttcctcctgttgaaccccagcttgagacagtggacggagcagagcatggtctacctgacacttcttggtctccacctgctatggcctctacctccctgtcagaagctccacctttctttatggcatcaagcatcttctctctgactgatcaaggcaccacagatacaatggccactgaccagacaatgctagtaccagggctcaccatccccaccagtgattattctgcaatcagccaactggctctgggaatttcacatccacctgcatcttcagatgacagccgatcaagtgcaggtggcgaagatatggtcagacacctagatgaaatggatctgtctgacactcctgccccatctgaggtaccagagctcagcgaatatgtttctgtcccagatcatttcttggaggataccactcctgtctcagctttacagtatatcaccactagttctatgaccattgcccccaagggccgagagctggtagtgttcttcagtctgcgtgttgctaacatggccttctccaacgacctgttcaacaagagctctctggagtaccgagctctggagcaacaattcacacagctgctggttccatatctacgatccaatcttacaggatttaagcaacttgaaatacttaacttcagaaacgggagtgtgattgtgaatagcaaaatgaagtttgctaagtcagtgccgtataacctcaccaaggctgtgcacggggtcttggaggattttcgttctgctgcagcccaacaactccatctggaaatagacagctactctctcaacattgaaccagctgatcaagcagatccctgcaagttcctggcctgcggcgaatttgcccaatgtgtaaagaacgaacggactgaggaagcggagtgtcgctgcaaaccaggatatgacagccaggggagcctggacggtctggaaccaggcctctgtggccctggcacaaaggaatgcgaggtcctccagggaaagggagctccatgcaggttgccagatcactctgaaaatcaagcatacaaaactagtgttaaaaagttccaaaatcaacaaaataacaaggtaatcagtaaaagaaattctgaattactgaccgtagaatatgaagaatttaaccatcaagattgggaaggaaattaa

SEQ ID NO: 485 - DNA, 9498 bp, Homo sapiens
  source 1..9498: mol_type = genomic DNA
atgactgacaaatcaatcgtcattctgagcctgatggtttttcacagctctttcataaatggaaaaacatgtagacggcaattggtggaagaatggcatccacaaccctcatcatatgtggtaaattggacactaacagaaaacatctgcttggacttctacagagattgctggtttttgggtgtaaacactaaaatagatacttcaggcaatcaagctgttccccagatttgccctttgcaaattcaattaggagatatccttgtaatttcttctgaaccatctcttcaatttccagaaataaatttgatgaatgtttctgaaacatctttcgttggctgtgtgcaaaataccacaacggaagatcagttactttttggctgcagactaaaaggaatgcacactgttaattctaagtggctgagtgttgggacacattattttatcacagttatggcaagtggtccatcaccttgtccactgggacttcgactaaatgtgacagtgaaacagcagttctgccaggaatctctgagttcagaattttgctctggtcatggtaaatgtcttagtgaagcttggagcaagacatatagctgccattgccagcctccattttctggaaaatactgccaggaacttgatgcatgttcttttaaaccatgtaaaaataatggcagttgcattaataaaagagaaaattgggatgagcaagcatatgaatgtgtctgtcacccaccatttacaggaaagaattgctcagaaataattggccagtgtcaaccacatgtctgtttccatggaaactgcagcaatattacttcaaatagtttcatttgtgaatgtgatgagcaattttcaggtccattctgtgaggtgtcagcaaaaccttgtgtttctctgcttttttggaaaagaggaatttgcccaaatagcagttctgcttatacttatgaatgcccaaaaggatcttccagccaaaatggtgaaactgatgtcagtgagttttcattagtaccatgtcagaatggtactgactgcatcaaaatatcaaatgatgttatgtgcatctgttcaccaatatttacagatttgctttgtaagagcattcaaacatcatgtgagtcatttcctttgaggaataatgctacatgtaagaaatgtgagaaagattatccttgcagctgtatatcaggatttactgaaaaaaactgtgagaaagcaattgaccactgtaaactgctcagcatcaactgtctgaatgaagaatggtgtttcaatataattggaagattcaaatatgtatgcattccagggtgcacaaaaaatccatgttggtttttgaagaatgtttacctaattcatcaacacctctgctactgtggagtcaccttccatggtatttgccaagataaaggtcctgctcaatttgaatatgtgtggcaattgggatttgcaggatctgaaggcgaaaagtgccaaggggttattgatgcctatttctttctggctgcaaactgcactgaagatgcaacctatgtgaacgatcctgaagataataattcttcatgttggttcccacatgaaggcacaaaagagatttgtgcaaatggatgcagttgtttgagtgaagaagacagtcaggaatatcggtatctatgttttctcagatgggctggcaacatgtatctggaaaatacaactgatgatcaagaaaatgagtgtcaacatgaagctgtttgtaaagatgaaattaatagacccagatgcagctgttctcttagttacattggcagattgtgtgttgtcaatgttgactattgcttagggaaccacagtatatcagtgcatggcctctgcctggccctttcgcacaattgtaactgtagcggtctgcaaagatatgaaaggaacatctgtgagatagatactgaagactgcaaatctgcgtcctgcaaaaatggaacaactagtacacatttaaggggatatttcttccgcaagtgtgtcccaggatttaaaggtacgcaatgtgaaattgatatagatgagtgtgcttcacatccctgcaaaaatggagccacctgcattgaccaacctggtaattacttctgccagtgtgtgcctccatttaaagtggttgatggcttttcctgcttatgcaatccaggctatgttgggataagatgtgaacaggacattgatgactgcatcctgaatgcctgtgagcacaattctacctgcaaagacctgcatctcagctaccagtgtgtgtgcctatctgattgggaaggaaatttttgtgaacaagaatccaatgagtgtaaaatgaatccttgcaagaacaattccacctgtactgacctttacaaaagctatcgatgtgagtgtacatctggatggactggacagaactgtagtgaagaaataaatgaatgcgactctgatccatgcatgaatggaggtctttgtcatgaatctaccatccctggacaatttgtatgtctgtgcccacccctttatactggacaattttgccaccaacgctataacctttgtgacctacttcataacccttgcagaaacaactcaacatgcttagctttggtagacgcaaatcagcattgtatttgtagagaagaatttgaaggtaaaaactgtgaaattgatgtgaaagactgcctcttcctttcctgccaggattatggtgactgtgaagatatggtcaacaatttcaggtgtatttgcagacctgggttttctggatctctgtgtgaaattgaaattaatgaatgttcctctgaaccttgcaaaaataatggaacatgtgtggatctgacaaacagatttttttgtaattgtgaacctgagtaccatgggcccttctgtgaacttgatgtaaataaatgtaaaatctcaccttgtctagatgaagaaaattgtgtctacaggactgatggatacaactgcctctgtgcccctggttatacaggcatcaactgtgaaataaatctagatgaatgcctatcagagccctgtctccatgatggagtttgtatcgatggcatcaatcattatacctgtgactgcaagagtgggttttttggaacacactgtgaaacaaacgccaatgattgcctttcaaatccttgtctacatggaaggtgcacagaacttattaatgaatatccatgttcatgtgatgcagatgggactagcacacaatgtaagatcaaaattaatgactgcacatcaatcccttgtatgaatgaaggcttctgtcagaagtcagcacatggatttacttgcatttgcccacgtggatacactggtgcatactgtgaaaaaagcattgataattgtgctgagcctgaacttaattcagtcatctgtcttaatggagggatctgtgttgatgggcctggacatacttttgactgcagatgtcttcctggattttctggtcaattttgtgaaattaatataaatgaatgctcttcatcaccatgtctacatggtgcagactgtgaagatcacatcaatggatatgtttgcaaatgccaaccaggatggtctggacaccactgtgagaatgagcttgagtgcattcccaactcatgtgttcatgaactctgcatggagaatgaacctggctcgacatgtttatgcacacctggatttatgacctgctccattgggcttctttgtggtgatgaaataaggagaattacctgtttaactcccatctttcaaagaacagatcccatttccacacagacatatacaattcccccttctgagactttggtcagcagctttccatctataaaggctactagaataccagccataatggacacttacccagttgatcaaggtccaaaacagacaggcattgtcaagcacgacattctcccaaccactggtttggcaacattaagaattagcacacccttggaaagctacttactccaagaactgattgtcactagagagctttcagcaaaacacagtcttctttcttccgcagatgtttcctcttctcgattcctgaattttggtattcgtgacccagcacaaattgtccaggacaaaacatcggtatcacatatgcctattcgaacttcagcagccacactaggtttcttttttcctgataggagagcaaggaccccatttatcatgtcttccttaatgtcagattttatttttcctacacaatctttattatttgagaactgtcagactgttgctttatctgctaccccaacgacttcagtaattagaagcattccaggggctgatattgagctaaacaggcagtcattactctcccgtggattcctgcttatagctgcctccataagtgcaactccagttgtctctaggggggctcaagaggatattgaagaatattcagctgattctttaatttcaagaagagagcactggagattgctcagcccctcgatgtctcccatttttcctgctaaggtaattatatctaaacaggtaaccatcttaaactcatcagctctgcaccggttcagtacaaaagccttcaatcccagtgaatatcaggctattactgaggcttcaagcaaccagagactcacaaacatcaaatcacaggctgctgattctttaagagaattaagccaaacatgtgcaacatgttctatgactgaaataaaatcctctcgtgaattctcagatcaagttttgcatagcaaacagtcccacttttatgagacattctggatgaactcagcgatattagccagctggtatgcactaatgggagctcaaactatcacttctgggcattcattttcttctgctactgaaataacaccatcagtggcattcacagaagtgccatctttatttccttctaaaaagagtgcaaaaagaacaattttatcctcatccttggaagaatccattaccctatcaagtaatttggatgttaatttatgtttggataagacttgtttatccattgtcccttcacaaactatctcttcagacttgatgaattctgatttgacttcaaaaatgactactgatgaactgtcagtatcagaaaacattttaaaactattgaaaataagacaatatggcataactatgggacccactgaggtactaaatcaagagagcttattggacatggaaaaaagtaaaggatctcatacactgttcaaacttcacccaagtgatagttctctggattttgagttaaacttacaaatttatccggatgttactttaaagacatattcagaaattacacatgcaaatgacttcaaaaataatctgccaccattgacaggctcagtgcctgatttttcagaagtcaccaccaatgttgcattttatacagtttcagcaactccagcactttcaatacagacgtcttcctccatgtctgtaattaggccagattggccatattttacagattatatgacctctcttaaaaaagaggtcaagacttcttcagaatggtccaaatgggaacttcagcctagtgtgcaatatcaggaatttcccactgcaagccggcatcttcccttcactagatctcttactttgtcttcactggaatccattctggcacctcaacggctgatgatttctgatttcagttgtgttcgttattatggagattcttatctagaatttcagaatgtggctttaaatccacaaaataacatctccctagaatttcagaccttcagctcctatggacttctgctgtatgtcaagcaagactcaaatttagtagatggattttttattcaattgtttattgaaaatggtactttaaagtaccacttttactgtcctggtgaagcaaaatttaaaagcattaatactactgttagagtggacaacgggcaaaagtatacactgcttatcaggcaagaattggatccatgtaacgctgagctgactattttagggaggaatacacaaatatgcgaatctatcaatcatgtactcggaaaacccctgccaaaatcaggatctgtcttcattggtggatttccagaccttcatgggaaaatccagatgcctgtaccagtcaagaattttactggctgcatagaagttatagaaataaataactggagatctttcattccatccaaggcagtgaaaaactatcacattaacaattgcagatcccagggatttatgctgtctccaacagcctcctttgttgatgcttctgatgtgacacaaggggttgataccatgtggacttctgtcagcccctctgttgcagcaccctctgtgtgccagcaggatgtatgccacaatggaggcacatgccatgccatcttcctctccagtggcatagtgtcattccaatgtgactgtccactacatttcactggccgcttctgtgaaaaagatgcaggtttattctttccatctttcaatgggaattcctatttagaactgccctttttgaagtttgtcctggagaaggaacataacagaactgttaccatctacttgactataaaaacaaacagtttaaatggaactattctttacagtaatgggaataattgtggaaagcagtttcttcatttatttcttgtggaaggaaggccatcagttaaatatgggtgtggaaattctcaaaatattttgactgtttctgctaattacagcattaacacaaatgcattcacccctatcacaatacgctacacaacgcctgttggcagccctggagttgtttgtatgattgaaatgactgcagatggaaaacctccagtacagaagaaagacacagagatttcccatgcctctcaggcatattttgaatcaatgttccttggccatattcctgcaaatgttcaaattcataagaaagcaggtcctgtttatgggttcaggggctgcattctagaccttcaagtaaacaacaaagaattcttcatcatcgatgaagcacgacatggaaagaatattgagaactgccacgtcccttggtgtgctcatcatctgtgccgcaacaatggcacctgcatcagtgataatgaaaatctgttttgtgagtgtccaaggctgtattcaggcaagctgtgccagtttgcaagttgtgaaaacaacccatgtggaaatggtgccacctgtgttccaaaatccggaacagatattgtctgcctctgcccatatgggaggtctggacccctctgcactgatgctattaatattactcagccaaggttcagtggcacagatgcctttggatacacctcattcctggcttattcacggatctcagacatcagcttccattatgaattccacctgaagtttcagctggcaaacaaccactcagcactgcaaaataacttgatattttttactggacagaaaggccatgggttgaatggcgatgacttcctggctgtgggcctgctcaatggcagtgtggtttatagttataacctggggtctggcatagcaagcatcaggagcgagcccctcaatctgagccttggagtccacactgttcatctgggcaagttcttccaagagggctggctgaaggtagatgatcataaaaataaatccattatcgccccaggaagactggttggtctcaatgtcttcagtcagttttatgtaggtggctacagtgaatacactccagatctcttaccaaatggagcagattttaaaaatggttttcaaggctgtattttcactcttcaagttcgcactgagaaggatggccatttcagaggactgggaaatcctgagggccacccaaatgctggacgcagtgttggccagtgtcatgcttctccctgcagtttaatgaaatgtggcaatggtgggacatgcatagagagtggaactagtgtttactgcaattgtaccactgggtggaaaggatcattctgcacagagacagtttctacctgtgatcctgaacatgaccctccacaccactgtagcagaggagcaacctgcatttcattacctcatggatacacctgtttctgtcctctaggaaccactggaatctactgtgaacaagcacttatcctcattgtgatcttggaaaagccaaaaccagcagaacggaaagtgaagaaggaggctttatccataagtgatccatctttcagaagcaatgagttatcctggatgtcttttgcttcctttcatgttcgaaaaaagacacatattcaattgcagtttcagcctctcgctgcagatggtatcctattttatgctgcacaacacttaaaagcccaatcaggtgattttttatgcatctctttagtaaatagttccgttcaacttcgctacaaccttggcgacagaactatcattctagaaactctccaaaaagtaactataaacggaagtacttggcatataataaaagcaggaagagttggtgcagaaggctacctggatctagatgggataaatgtaacagaaaaggcctccactaaaatgagttctctggacacaaatacagacttctatattggaggagtatcttctttaaatcttgtaaatcccatggcaatagaaaatgaacctgtaggttttcaaggctgtatccgacaagttatcataaataatcaagaattacaattaactgaatttggagcaaaaggtggctcaaatgtaggtgactgtgatgggacagcctgtgggtacaacacatgcagaaatggaggtgaatgtacagtaaatggcacaactttttcttgcagatgtttgccagattgggctggaaatacatgtaaccagtctgtgtcctgtttgaataatctttgcctccaccaatctttatgtatacctgaccaatcattttcttacagttgcctgtgtactttgggttgggtgggaaggtattgtgaaaacaaaacttcattttcaactgcaaaatttatgggtaattcttacattaaatacattgatccaaattatagaatgagaaacctccagttcactactatatccttaaatttcagtaccactaaaacagaaggtctaattgtatggatgggaatagctcaaaatgaagaaaatgattttctggcaattggtctccataatcagaccttgaaaatagcagttaacttgggagaaagaatctctgtgcctatgagctataacaatggcacattctgttgtaataaatggcaccatgtagttgtaattcaaaatcagactcttatcaaggcctacataaataacagtctaattctttccgaggatattgatccacataaaaactttgtggctctaaactatgatggcatttgttatctagggggctttgaatatggtagaaaggtaaatatcgttactcaagagatttttaaaaccaattttgttggcaaaattaaagatgttgtattttttcaggaaccaaaaaacattgaactaattaaattagaaggatacaatgtttatgatggagatgaacaaaatgaggttacataa

SEQ ID NO: 486 - DNA, 2766 bp, Homo sapiens
  source 1..2766: mol_type = genomic DNA
atgaagacctgctggaaaattccagttttcttctttgtgtgcagtttcctggaaccctgggcatctgcagctgtcaagcgtcgccccagattccctgtcaattccaattctaatggtggaaatgaactctgtccaaagatcaggattggccaagatgacttaccagggtttgatctgatctctcagttccaggtagataaagcagcatctagaagagctatccagagagtagtgggatcagctacattgcaggtggcttacaagttgggaaataatgtagacttcaggattccaactaggaatttatatcccagtggactgcctgaagaatactccttcttgacgacgtttcgaatgactggaagcactctcaaaaagaactggaacatttggcagattcaggattcctctgggaaggagcaagttggcataaagattaatggccaaacacaatctgttgtattttcatacaagggactggatggaagtctccaaacagcagccttttcgaatttgtcctccttgtttgattcccagtggcataagatcatgattggcgtggagaggagtagtgctactctttttgttgactgcaacaggattgaatctttacctataaagccaagaggcccaattgacattgatggctttgctgtgctgggaaaacttgcagataatcctcaagtttctgttccatttgaacttcaatggatgctgatccattgtgaccccctgcggcccaggagagaaacttgccatgagctgccagccagaataacgcccagccagaccaccgacgagagaggtcccccgggtgagcagggtcctcccgggcctccgggcccccctggagttccaggcatcgatggcatcgacggtgaccgaggtcctaagggccccccgggccccccgggtcctgcaggtgaaccgggaaagccaggagctccaggcaagcctggcacacctggcgctgatggattaacaggacctgatggatcccctggctccattgggtcaaagggacaaaaaggagaacctggtgtgcctggatcgcgtggatttccaggccgtggtattcctggaccccctggtcctcctgggacagcaggactccctggagagcttggccgtgtaggacctgttggtgaccctgggagaagaggaccacctggcccccctggccccccaggacccagaggaacaattggctttcatgatggagatccattgtgtcccaatgcctgtccaccaggtcgctcaggatatccaggcctaccaggcatgaggggtcataaaggggctaaaggagaaattggtgaaccaggaagacaaggacacaagggtgaagaaggtgaccagggagaactcggagaagttggagctcaaggacctccaggagcccagggtttgcgaggcatcaccggcatagttggggacaaaggggaaaaaggtgctcggggcttagatggtgaacctgggcctcagggtcttcctggtgcacctggtgatcaaggacagcgaggacctccaggagaagcaggtcccaaaggagatagaggggctgaaggtgctagaggaattcctggtctccctgggcccaaaggagacacgggtttgccaggtgtggatggccgtgatgggatccctggaatgcctggaacaaagggtgaaccaggaaaacctgggcctcctggtgatgcaggattgcaggggttaccaggtgtacctggaattcctggtgcaaagggtgttgctggtgaaaagggtagcacaggtgctccagggaagcctggtcagatgggaaattcaggcaaaccgggccaacaggggcctccaggagaggtgggaccccgaggaccccaggggcttcctggcagtagaggagaattaggaccagtgggatccccaggcctaccaggtaaactgggttctctgggtagccctggcctccctggcttgcctgggccccctggacttcctggaatgaaaggtgacaggggtgtagtcggtgaaccgggtccaaagggtgaacagggtgcctctggtgaagaaggtgaagcaggagaaaggggggaacttggagatataggattacctggcccaaagggatctgcaggtaatcctggggaacctggcttgagagggcctgagggaagtcgggggcttcctggagtggaaggaccaagaggaccacctggaccccggggtgtgcagggagaacagggtgccaccggcctgcctggtgtccagggccctccgggtagagcaccgacagatcagcacattaagcaggtttgcatgagagtcatacaagaacattttgctgagatggctgccagtcttaagcgtccagactcaggtgccactgggcttcctggaaggcctggccctcctggtccccccggccctcctggagagaatggtttcccaggccagatgggaattcgtggccttccgggcattaaggggccccctggtgctcttggtttgaggggacctaaaggtgacttgggagaaaagggggagcgtggccctccaggaagaggtcccaacggtttgcctggagctataggtctcccaggtgacccaggccctgccagctatggcagaaatggccgagacggtgagcgaggccccccaggggtggcaggaattcctggagtgcctggacccccgggacctcctgggcttcccggtttctgtgagccagcctcctgcaccatgcaggctggtcagcgagcatttaacaaagggcctgacccttga

SEQ ID NO: 487 - DNA, 5079 bp, Homo sapiens
  source 1..5079: mol_type = genomic DNA
atgtcctcggccgtggggccccgcggtcctcgcccacccacggtgcctccccccatgcaagagctgcccgacctgagccacctgaccgaagaggagaggaacattatcatggcagtgatggaccggcagaaggaagaggaggaaaaagaagaagccatgctcaagtgtgttgtcagggacatggcgaagcctgctgcctgcaaaacaccaagaaatgctgaaaaccagccccaccaaccttcaccgagattgcatcaacagtttgaaagctataaggaacaagtgagaaaaataggggaagaagcgcggcgttaccagggcgagcacaaagacgatgctccgacttgtggaatctgtcataaaacaaagtttgctgatgggtgcggtcatctctgctcctattgtcgcactaagttctgtgcgcgctgcggaggccgcgtgtctctacggtcaaacaacgaggacaaagtggttatgtgggtatgcaatttatgtcgaaagcaacaagaaatcttaaccaaatctggggcatggttctttggaagtggccctcagcagacaagtcaggatggaaccctgagtgatacagctacaggtgctggctctgaggtaccaagagaaaagaaagcacgactccaagagcgatcgcggtctcagacacccctaagcacagcagctgcctcctcccaggatgctgctcctcccagcgcaccaccagacaggagcaaaggggctgagccctcgcagcaagccttggggcctgaacagaagcaggcttcatccaggtctagaagtgaacctcctagagagagaaagaagaccccagggctttccgagcagaatggcaaaggagccctgaagagcgagcggaaacgcgtgccaaagacctcagcgcagcccgtggagggggccgtcgaagaacgggagcgcaaagaaaggcgggaaagccgaaggcttgagaaagggcgatcacaggattacccagacacgccggaaaaacgggatgagggcaaagcggcggatgaggaaaagcaaagaaaagaggaggattatcagaccaggtaccgcagcgacccgaacctagctcggtacccggtgaaaccgccgcctgaggagcagcagatgcgcatgcacgcccgggtgtcccgcgccaggcacgagcggcgccacagcgacgtggcgctcccgcgcaccgaggcgggcgcggcgctgccggagggcaaggccggcaaacgcgcgccggcggcagccagggcctcgccgccggactcgccgcgggcttactcggctgagagaactgcggagaccagggcgccgggcgccaagcagctaacgaaccacagcccgccggcgcccagacatgggccggttcccgcagaagccccggagctcaaagcccaggagcccctcaggaagcagagccgcctggaccccagctcggcggtcctcatgcggaaggccaagcgcgagaaggtggagaccatgctgcggaacgactctttgagctcagaccagtccgagtcggtgcggccgtccccgcccaagccgcaccggtccaagagaggcggcaagaagcggcagatgtcggtgagcagctctgaggaggagggcgtgtcgacgcccgagtacaccagctgcgaggacgtggagctggagagcgagagcgtcagcgagaaaggtgatttggattattactggttggatcctgccacgtggcacagccgggagacatcacctattagttcgcatcctgtaacgtggcaaccatctaaagagggggaccgattaattggacgtgttattcttaacaagagaacaaccatgcccaaagactcaggtgcattgctgggtctgaaagttgttggaggaaaaatgactgacttaggacgacttggtgctttcatcaccaaagtaaagaagggtagcctagcagatgtagttggacacctaagagcaggggatgaagttctagaatggaatggtaaacccctgccgggagctacaaatgaagaagtttacaacattattttagaatcaaaatcagaacctcaagttgaaattattgtttcaaggcctattggtgacattccccggattcctgagagctcccaccctccactggagtccagttcaagttcctttgaatctcagaagatggaaaggccttccatttctgttatttctccaacaagtcctggagctctaaaagatgccccacaagtcttaccagggcaactttctgtgaagttgtggtatgataaagtgggacaccagctgattgtaaatgttctgcaagcaacagatctacctgctagagtagatggacgtcctcgaaatccctatgtaaaaatgtattttcttccagatagaagtgataaaagtaaaaggaggaccaaaacagtaaagaaaatactagaaccaaaatggaatcaaacttttgtctattcacatgtacatcgtagagattttagagaacgaatgttagaaataactgtgtgggaccaaccaagagtgcaagaagaagaaagtgaatttcttggagagatcctcatagaattggagacagcgcttttagatgatgaaccgcattggtataaacttcagacacatgatgagtcttcactacctctgcctcagccatcacctttcatgccaaggcgacatattcatggagaaagctctagcaaaaagctacaaagatctcagcgaatcagtgatagtgacatctcagattatgaggttgatgatggtattggcgtagttcctccagtaggctataggtctagtgctagagaaagtaaatctacaacattaactgtgccagaacagcaaagaacaactcatcaccgctcacgttcagtatctcctcatcgcggcaatgatcagggaaagccgcgttcacgtttaccaaatgtgccattacagaggagtttagatgaaattcatccaacaagaaggtcacgttctccaaccagacaccatgatgcctcccgaagtccagttgatcatagaaccagagatgtggatagtcagtatttatcagaacaagacagtgagcttcttatgctgcccagagcaaaacgaggacgaagtgcagaatgcctacatactaccagacatcttgttaggcactataaaacattacctcccaagatgcctttattacagagcagttctcactggaatatttacagctcaattctgcctgcacatactaagaccaaatcagtgactagacaggacatttcccttcatcatgaatgctttaactcaacagtattgagatttactgatgaaatactggttagtgaactgcagccctttcttgacagggctaggagtgctagtaccaactgcttgagaccagatactagtttgcattcaccagaacgagaaaggggtagatggtccccctccctagataggagacgacctcctagtcccaggattcaaatccagcatgcgtctccggagaatgacaggcactccagaaagtctgaaagatctagcatccaaaaacagactaggaaaggcactgcctctgatgcagaaagggttctcccaacatgtctttctagaaggggacacgcagccccaagagcaactgatcagccagtcattaggggaaaacatcctgctcgctcaaggtcgagtgagcactctagtatcagaacactgtgttctatgcaccaccttgtccctggagggtcggcgccaccttctccgcttctgacaagaatgcaccgacagagaagtccaacacaatctcctccagcagacacatcgttcagcagtcgcaggggaagacagctcccacaagtgccagtgagaagcggcagtatagaacaagcaagcttagtagtggaggagcgaacaagacagatgaaaatgaaagtgcatcgatttaagcagacaacagggtctggttctagtcaagaacttgatcgcgagcaatattccaagtataacatacataaagatcagtacagaagctgtgataacgtctctgccaaatcatcagatagtgatgtcagtgatgtttccgccatttcccgaaccagcagtgcctcacgcctcagcagcacaagctttatgtcagagcaatctgagcgccccaggggtagaatcagttcatttacccccaaaatgcaaggcagacggatggggacttcaggaagatccatcatgaagagcaccagtgtcagtggagagatgtacacactggagcataatgacggcagccagtcagacacagctgtgggtacagttggagcaggtggaaagaaacggagatccagccttagtgccaaagtggttgccatagtgtctcgaaggagtagaagcacatcccagcttagtcaaacagagtcgggccacaaaaagttaaaaagtaccatccagagaagcacagaaacaggcatggcagctgaaatgagaaagatggtaaggcagccgagccgagagtctactgatggcagcatcaacagttacagctctgagggcaatttaatatttcctggagtgcgactgggagctgacagtcaattcagtgattttcttgatggattgggaccagcccagcttgttggccgccaaacccttgccacccctgcaatgggtgatatacaaataggaatggaggacaaaaagggccaattagaagtggaagtcattagagcacgaagcctcacacaaaagcctggttccaaatctacacctgctccatatgtcaaagtatatcttttggaaaatggggcctgtatagccaagaagaagacaagaattgcacgaaaaacccttgatcctttgtatcagcagtctctggtttttgatgaaagtccacagggtaaagttcttcaggtgattgtctggggagactatggcagaatggaccacaaatgctttatgggtgtggctcagatcttgttggaagaactcgacctgtccagcatggtgatcggatggtacaaattgttcccaccgtcctcactggtggatcccacactcactcccctcacccggcgggcttcccagtcatctctggaaagttcaactgggcctccctgtattcgatcatag

SEQ ID NO: 488 - DNA, 2094 bp, Homo sapiens
  source 1..2094: mol_type = genomic DNA
atgggggaaagagcaggaagtccaggtactgatcaagaaagaaaggcaggcaaacaccattattcttacttatctgattttgaaacgccacagtcttctggccgatcatcgctggtcagttcttcacctgcaagtgttaggagaaaaaatcctaaaagacaaacttcagatggccaagtacatcaccaagcccctcggaaaccaagccctaagggtctaccaaacagaaagggagtccgagtgggatttcgctcccagagcctcaatagagagccacttcggaaagatactgatcttgttacaaaacggattctgtctgcaagactgctaaaaatcaatgagttgcagaatgaagtatctgaactccaggtcaagttagctgagctgctaaaagaaaataaatctttgaaaaggcttcagtacagacaggagaaagccctgaataagtttgaagatgccgaaaatgaaatctcacaacttatatttcgtcataacaatgagattacagcactcaaagaacgcttaagaaaatctcaagagaaagaacgggcaactgagaaaagggtaaaagatacagaaagtgaactatttaggacaaaattttccttacagaaactgaaagagatctctgaagctagacacctacctgaacgagatgatttggcaaagaaactagtttcagcagagttaaagttagatgacaccgagagaagaattaaggagctatcgaaaaaccttgaactgagtactaacagtttccaacgacagttgcttgctgaaaggaaaagggcatatgaggctcatgatgaaaataaagttcttcaaaaggaggtacagcgactatatcacaaattaaaggaaaaggagagagaactggatataaaaaatatatattctaatcgtctgccaaagtcctctccaaataaagagaaagaacttgcattaagaaaaaatgctgcatgccagagtgattttgcagacctgtgtacaaaaggagtacaaaccatggaagacttcaagccagaagaatatcctttaactccagaaacaattatgtgttacgaaaacaaatgggaagaaccaggacatcttactttggacttgcaatctcaaaagcaagacaggcatggagaagcagggattctaaacccaattatggaaagagaagaaaaatttgttacagatgaagaactccatgtcgtaaaacaggaggttgaaaagctggaggatgaatgggaaagagaagaacttgataaaaagcaaaaagaaaaggcatctttactggaaagagaagaaaagccagagtgggaaactggaaggtaccaactaggaatgtatccaattcagaatatggataaattgcaaggagaggaagaagaaagactgaagagagaaatgctacttgctaaactgaatgaaattgacagagaactccaagattctcgaaatctaaaataccctgttttgccattgttacctgattttgaatcaaaactacactccccagagagaagccccaaaacatacaggttctctgaatcctcagagagattatttaatgggcatcatttgcaagacatcagtttctcaactccaaaaggagaaggtcagaattcaggaaatgttagaagtccagcctcccctaatgagttcgcatttggtagctacgtgccttcgtttgcaaaaacatcagagaggtcaaatccatttagtcaaaaaagtagttttttggatttccaaagaaacagtatggaaaaacttagtaaagatggtgtagatttaattacaagaaaagagaaaaaagctaatttgatggaacagttatttggtgccagtggtagcagcaccatttcctccaaaagcagtgacccaaattctgtggcttccagtaaaggagacattgaccctctaaattttctccctgggaataaaggcagcagagatcaagaacatgatgaagatgaaggctttttcctcagtgaaggaagaagttttaatccaaataggcaccgattaaaacatgcagacgataaaccagcagtaaaagcagctgattctgtagaagatgaaattgaagaagtagcactgagatga

SEQ ID NO: 489 - DNA, 945 bp, Homo sapiens
  source 1..945: mol_type = genomic DNA
atggggctcctggactcggagccgggtagtgtcctaaacgtagtgtccacggcactcaacgacacggtagagttctaccgctggacctggtccatcgcagataagcgtgtggaaaattggcctctgatgcagtctccttggcctacactaagtataagcactctttatctcctgtttgtgtggctgggtccaaaatggatgaaggaccgagaaccttttcagatgcgtctagtgctcattatctataattttgggatggttttgcttaacctctttatcttcagagagttattcatgggatcatataatgcgggatatagctatatttgccagagtgtggattattctaataatgttcatgaagtcaggatagctgctgctctgtggtggtactttgtatctaaaggagttgagtatttggacacagtgttttttattctgagaaagaaaaacaaccaagtttctttccttcatgtgtatcatcactgtacgatgtttaccttgtggtggattggaattaagtgggttgcaggaggacaagcattttttggagcccagttgaattcctttatccatgtgattatgtactcatactatgggttaactgcatttggcccatggattcagaaatatctttggtggaaacgatacctgactatgttgcaactgattcaattccatgtgaccattgggcacacggcactgtctctttacactgactgccccttccccaaatggatgcactgggctctaattgcctatgcaatcagcttcatatttctctttcttaacttctacattcggacatacaaagagcctaagaaaccaaaagctggaaaaacagccatgaatggtatttcagcaaatggtgtgagcaaatcagaaaaacaactcatgatagaaaatggaaaaaagcagaaaaatggaaaagcaaaaggagattaa

SEQ ID NO: 490 - DNA, 2124 bp, Homo sapiens
  source 1..2124: mol_type = genomic DNA
atgcacggagccgccagagcgccagccaccagcgtgagtgccgactgctgcatcccggccggcttgcgcctcggaccggtgcctggtaccttcaagctgggcaagtacctgtcagaccgcagggagcccgggcctaagaaaaaggtgcgcatggtgagaggggagctggtggacgagtcggggggctcccctctggagtggatagggttaatccgggcagccagaaactcccaggaacagactctggaagctattgcagacttacccggaggacagatcttctaccgagcattgcgagacgtccagccaggggaggagctgacagtgtggtattctaactccttggctcagtggttcgacatccccaccacagcgactccgactcacgacgagaaaggggaggagcgctacatctgctggtactgctggaggacgtttagataccccaacagccttaaggcacacctgcgtttccactgcgtgttcagcggcggtggaggcggcgccttcctgcaccacgaacacgcggctcgccaaggcgccgtcccagcggctgatggcctcggtctctccccaaaacccccggcgcccgatttcgccgcgccttcccaggcaggaactttgcgaccccaccccctgggcccgccaccagttcaggcctgcggtgcgcgggagggcatcaagcgcgaggcctcttccgcgccctcggccacctcgccgaccccaggcaagtgggggcagcccaagaagggcaaggagcagctggaccgtgccctggacatgagcggagccgcccgaggacaagggcacttcctcggcatcgtgggcggctcctcggcgggggtcggcagcctggctttctaccccggcgtgcgctcagctttcaagcccgccggcctagcgagggcggcggcggccgctcacggcgacccctaccgggaggagagcagcagcaagcaaggagccggcctcgctttgggcaggctgctgggcgggggccgggcgtgcgggcgccccgggagcggggagaactcggcggcgggcggcgcgggtcaccaccatcaccaccacgcgcaccaccaccaccatcccaagtgcctgctcgctggggacccgccgccgccgccgccgcctggcctgccctgctctggggccctgcgcggcttccctctgctctccgtccccccggaagaggcgtccgccttcaagcacgtggagcgcgccccgcccgcagccgccgcgctgccaggagcgcgttatgcgcagctgccccctgcgccggggttgcccctcgagcgctgcgcgctgccgcccctcgacccgggcggtctcaaagcctatccgggtggtgagtgcagccacctgcccgccgtcatgccggcctttacagtctacaacggggagctgctctacggctcaccggccaccaccgcttattacccgctcaaattgcacttcggcgggctgctgaagtatccggagtccatctcctacttcagcgggcctgcagcggccgccctaagccccgccgagctggggtcgctggccagcatcgaccgagagatcgccatgcacaatcagcagctgtccgagatggctgccgggaagggtcgcggacgcctggactcggggacgttgccaccggccgtcgcggcggcgggaggcaccgggggcggcggcagcggaggcagcggcgcaggtaagcccaagaccggccacctgtgcctctactgtggcaagctgtactcgcgcaagtatgggctcaagatccacatgcggacgcacacgggctacaagccactcaagtgcaaagtctgtctgcggcccttcggcgaccccagcaatctcaacaagcacatccggctgcacgccgagggcaatacgccctaccgctgcgagttctgcggcaaggtacttgtgcgccgccgggacctggagcgacatgtcaagtcccgccaccctggccagagtctgctcgccaaagcgggcgacggcccgggtgccgagcccggctatcccccggagcctggggatcccaagagcgacgacagtgacgtggacgtctgcttcacagacgaccagagcgaccccgaggttgggggcggcggggagcgcgacttgtaa

SEQ ID NO: 491 - DNA, 1191 bp, Homo sapiens
  source 1..1191: mol_type = genomic DNA
atggaatttctgaagacttgtgtacttagaagaaatgcatgcactgcggtttgcttctggagaagcaaagttgtccaaaagccttcagttagaaggattagtactacctctcctaggagcactgtcatgcctgcttgggtgatagataaatatgggaagaatgaagtgcttcgattcactcagaacatgatgatgcctatcatacactatccaaatgaagtcattgtcaaagttcacgctgccagtgtaaatcctatagacgttaatatgagaagtggttatggagctacagctttaaatatgaagcgtgatcctttacacgtgaaaatcaaaggagaagaatttcctctgactctgggtcgggatgtctctggcgtggtgatggaatgtgggcttgatgtgaaatacttcaagcctggagatgaggtctgggctgcagttcctccttggaaacaaggcactctttcagagtttgttgtagtcagtgggaatgaggtctctcacaaacccaaatcactcactcatactcaagctgcctctttgccatatgtggctctcacagcctggtctgctataaacaaagttggtggcctgaatgacaagaattgcacaggaaaacgtgttctaatcttaggcgcttcaggcggagttggtacttttgctatacaggtaatgaaagcatgggatgctcatgtgacagcagtttgctcccaagatgccagtgaacttgtaaggaagcttggtgcagacgatgtaattgattacaaatctggaagtgtggaagagcagttgaaatccttaaaaccatttgattttatccttgataatgttggcggatccactgaaacatgggctccagattttctcaagaaatggtcaggagccacctatgtgactttggtgactcctttcctcctgaacatggaccgattgggcatagcagatggcatgttgcagacaggagtcactgtaggttcaaaggcattaaagcatttctggaaaggagtccattatcgctgggcatttttcatggccagtggcccatgtttagatgacattgcagaactggtggatgcgggaaagatccggccagttattgaacaaacctttcctttttctaaagttccagaagccttcctgaaggtggaaagaggacacgcacgaggaaagactgtaattaatgttgtttaa

SEQ ID NO: 492 - DNA, 3591 bp, Homo sapiens
  source 1..3591: mol_type = genomic DNA
atgcctacagctgagagtgaagcaaaagtaaaaaccaaagttcgctttgaagaattgcttaagacccacagtgatctaatgcgtgaaaagaaaaaactgaagaaaaaacttgtcaggtctgaagaaaacatctcacctgacactattagaagcaatcttcactatatgaaagaaactacaagtgatgatcccgacactattagaagcaatcttccccatattaaagaaactacaagtgatgatgtaagtgctgctaacactaacaacctgaagaagagcacgagagtcactaaaaacaaattgaggaacacacagttagcaactgaaaatcctaatggtgatgctagtgtagaggaagacaaacaaggaaagccaaataaaaaggtgataaagacggtgccccagttgactacacaagacctgaaaccggaaactcctgagaataaggttgattctacacaccagaaaacacatacaaagccacagccaggcgttgatcatcagaaaagtgagaaggcaaatgagggaagagaagagactgatttagaagaggatgaagaattgatgcaagcatatcagtgccatgtaactgaagaaatggcaaaggagattaagaggaaaataagaaagaaactgaaagaacagttgacttactttccctcagatactttattccatgatgacaaactaagcagtgaaaaaaggaaaaagaaaaaggaagttccagtcttctctaaagctgaaacaagtacattgaccatctctggtgacacagttgaaggtgaacaaaagaaagaatcttcagttagatcagtttcttcagattctcatcaagatgatgaaataagctcaatggaacaaagcacagaagacagcatgcaagatgatacaaaacctaaaccaaaaaaaacaaaaaagaagactaaagcagttgcagataataatgaagatgttgatggtgatggtgttcatgaaataacaagccgagatagcccggtttatcccaaatgtttgcttgatgatgaccttgtcttgggagtttacattcaccgaactgatagacttaagtcagattttatgatttctcacccaatggtaaaaattcatgtggttgatgagcatactggtcaatatgtcaagaaagatgatagtggacggcctgtttcatcttactatgaaaaagagaatgtggattatattcttcctattatgacccagccatatgattttaaacagttaaaatcaagacttccagagtgggaagaacaaattgtatttaatgaaaattttccctatttgcttcgaggctctgatgagagtcctaaagtcatcctgttctttgagattcttgatttcttaagcgtggatgaaattaagaataattctgaggttcaaaaccaagaatgtggctttcggaaaattgcctgggcatttcttaagcttctgggagccaatggaaatgcaaacatcaactcaaaacttcgcttgcagctatattacccacctactaagcctcgatccccattaagtgttgttgaggcatttgaatggtggtcaaaatgtccaagaaatcattacccatcaacactgtacgtaactgtaagaggactgaaagttccagactgtataaagccatcttaccgctctatgatggctcttcaggaggaaaaaggtaaaccagtgcattgtgaacgtcaccatgagtcaagctcagtagacacagaacctggattagaagagtcaaaggaagtaataaagtggaaacgactccctgggcaggcttgccgtatcccaaacaaacacctcttctcactaaatgcaggagaacgaggatgtttttgtcttgatttctcccacaatggaagaatattagcagcagcttgtgccagccgggatggatatccaattattttatatgaaattccttctggacgtttcatgagagaattgtgtggccacctcaatatcatttatgatctttcctggtcaaaagatgatcactacatccttacttcatcatctgatggcactgccaggatatggaaaaatgaaataaacaatacaaatactttcagagttttacctcatccttcttttgtttacacggctaaattccatccagctgtaagagagctagtagttacaggatgctatgattccatgatacggatatggaaagttgagatgagagaagattctgccatattggtccgacagtttgatgttcacaaaagttttatcaactcactttgttttgatactgaaggtcatcatatgtattcaggagattgtacaggggtgattgttgtttggaatacctatgtcaagattaatgatttggaacattcagtgcaccactggactataaataaggaaattaaagaaactgagtttaagggaattccaataagttatttggagattcatcccaatggaaaacgtttgttaatccataccaaagacagtactttgagaattatggatctccggatattagtagcaaggaagtttgtaggagcagcaaattatcgggagaagattcatagtactttgactccatgtgggacttttctgtttgctggaagtgaggatggtatagtgtatgtttggaacccagaaacaggagaacaagtagccatgtattctgacttgccattcaagtcacccattcgagacatttcttatcatccatttgaaaatatggttgcattctgtgcatttgggcaaaatgagccaattcttctgtatatttacgatttccatgttgcccagcaggaggctgaaatgttcaaacgctacaatggaacatttccattacctggaatacaccaaagtcaagatgccctatgtacctgtccaaaactaccccatcaaggctcttttcagattgatgaatttgtccacactgaaagttcttcaacgaagatgcagctagtaaaacagaggcttgaaactgtcacagaggtgatacgttcctgtgctgcaaaagtcaacaaaaatctctcatttacttcaccaccagcagtttcctcacaacagtctaagttaaagcagtcaaacatgctgaccgctcaagagattctacatcagtttggtttcactcagaccgggattatcagcatagaaagaaagccttgtaaccatcaggtagatacagcaccaacggtagtggctctttatgactacacagcgaatcgatcagatgaactaaccatccatcgcggagacattatccgagtgtttttcaaagataatgaagactggtggtatggcagcataggaaagggacaggaaggttattttccagctaatcatgtggctagtgaaacactgtatcaagaactgcctcctgagataaaggagcgatcccctcctttaagccctgaggaaaaaactaaaatagaaaaatctccagctcctcaaaagcaatcaatcaataagaacaagtcccaggacttcagactaggctcagaatctatgacacattctgaaatgagaaaagaacagagccatgaggaccaaggacacataatggatacacggatgaggaagaacaagcaagcaggcagaaaagtcactctaatagagtaa

SEQ ID NO: 493 - DNA, 972 bp, Homo sapiens
  source 1..972: mol_type = genomic DNA
atgagtgcggtgtgcggtggagcggcgcggatgctgcggacgccgggacgccacggctacgccgccgagttctccccgtacctgccgggccgcctggcctgcgccaccgcgcagcactacggcatcgcgggctgtggaaccctactaatattggatccagatgaagctgggctaaggctttttagaagctttgactggaatgatggtttgtttgatgtgacttggagtgagaacaacgaacatgtcctcatcacctgtagtggcgatggctcgctgcagctctgggacactgccaaagctgcagggccactgcaagtctataaagaacacgctcaggaggtgtatagtgttgattggagccaaaccagaggtgaacagcttgtggtgtctggctcatgggatcaaactgtcaaattgtgggatccaactgttggaaagtctctgtgcacctttagaggccatgaaagtattatttatagcacaatctggtctccccacatccctggttgttttgcttcagcctcaggtgatcagactctgagaatatgggatgtgaaggcagcaggagtaagaatcgtgattcctgcacatcaggcagaaatcttgagttgtgactggtgtaaatacaatgagaatttgctggtgaccggggcggttgactgtagtttgagaggctgggacttaaggaatgtacgacaaccagtgtttgaacttcttggtcatacctatgctattaggagggtgaaattttcaccatttcatgcttctgtgctggcctcttgctcgtatgattttactgtaagattctggaacttttcaaagcctgactctcttcttgaaacagtggagcatcatacagagtttacttgtggtttagacttcagtcttcagagccccactcaggtggctgactgttcttgggatgaaacaataaagatctatgaccctgcttgtcttactattcctgcttga

SEQ ID NO: 494 - DNA, 900 bp, Homo sapiens
  source 1..900: mol_type = genomic DNA
atgcacagcctggcgacggctgcgcctgtgcctactacactggcacaagtggatagagaaaagatctatcagtggatcaatgagctgtccagtcctgagactagggaaaatgctttgctggagctaagtaagaagcgagaatctgttcctgaccttgcacccatgctgtggcattcatttggtactattgcagcacttttacaggaaattgtaaatatttatccatctatcaacccacccaccttgacagcacaccagtctaacagagtttgcaatgctctggcattactgcaatgtgtagcatcacatccagaaaccaggtcagcgtttctcgcagcacacatcccactttttttgtacccctttttgcacactgtcagcaaaacacgtccctttgagtatctccggctcaccagccttggagttattggggccctggtgaaaacagatgaacaagaagtaatcaactttttattaacaacagaaattatccctttatgtttgcgaattatggaatctggaagtgaactttctaaaacagttgccacattcatcctccagaagatcttgttagatgacactggtttggcttatatatgtcagacgtatgagcgtttctcccatgttgccatgatcttgggtaagatggtcctgcagctatccaaagagccttctgcccgtctgctgaagcatgtagtgagatgttaccttcgactttcagataaccccagggcacgtgaagcactcagacagtgcctccctgaccagctgaaagacacaaccttcgcccaggtgctaaaagatgacaccaccacgaaacgctggcttgcacaactggtgaagaacctgcaagagggccaggtcaccgatccccggggtatccccctgccccctcagtga

SEQ ID NO: 495 - DNA, 2547 bp, Homo sapiens
  source 1..2547: mol_type = genomic DNA
atgaacagcagcagcgccaacatcacctacgccagtcgcaagcggcggaagccggtgcagaaaacagtaaagccaatcccagctgaaggaatcaagtcaaatccttccaagcggcatagagaccgacttaatacagagttggaccgtttggctagcctgctgcctttcccacaagatgttattaataagttggacaaactttcagttcttaggctcagcgtcagttacctgagagccaagagcttctttgatgttgcattaaaatcctcccctactgaaagaaacggaggccaggataactgtagagcagcaaatttcagagaaggcctgaacttacaagaaggagaattcttattacaggctctgaatggctttgtattagttgtcactacagatgctttggtcttttatgcttcttctactatacaagattatctagggtttcagcagtctgatgtcatacatcagagtgtatatgaacttatccataccgaagaccgagctgaatttcagcgtcagctacactgggcattaaatccttctcagtgtacagagtctggacaaggaattgaagaagccactggtctcccccagacagtagtctgttataacccagaccagattcctccagaaaactctcctttaatggagaggtgcttcatatgtcgtctaaggtgtctgctggataattcatctggttttctggcaatgaatttccaagggaagttaaagtatcttcatggacagaaaaagaaagggaaagatggatcaatacttccacctcagttggctttgtttgcgatagctactccacttcagccaccatccatacttgaaatccggaccaaaaattttatctttagaaccaaacacaaactagacttcacacctattggttgtgatgccaaaggaagaattgttttaggatatactgaagcagagctgtgcacgagaggctcaggttatcagtttattcatgcagctgatatgctttattgtgccgagtcccatatccgaatgattaagactggagaaagtggcatgatagttttccggcttcttacaaaaaacaaccgatggacttgggtccagtctaatgcacgcctgctttataaaaatggaagaccagattatatcattgtaactcagagaccactaacagatgaggaaggaacagagcatttacgaaaacgaaatacgaagttgccttttatgtttaccactggagaagctgtgttgtatgaggcaaccaacccttttcctgccataatggatcccttaccactaaggactaaaaatggcactagtggaaaagactctgctaccacatccactctaagcaaggactctctcaatcctagttccctcctggctgccatgatgcaacaagatgagtctatttatctctatcctgcttcaagtacttcaagtactgcaccttttgaaaacaactttttcaacgaatctatgaatgaatgcagaaattggcaagataatactgcaccgatgggaaatgatactatcctgaaacatgagcaaattgaccagcctcaggatgtgaactcatttgctggaggtcacccagggctctttcaagatagtaaaaacagtgacttgtacagcataatgaaaaacctaggcattgattttgaagacatcagacacatgcagaatgaaaaatttttcagaaatgatttttctggtgaggttgacttcagagacattgacttaacggatgaaatcctgacgtatgtccaagattctttaagtaagtctcccttcataccttcagattatcaacagcaacagtccttggctctgaactcaagctgtatggtacaggaacacctacatctagaacagcaacagcaacatcaccaaaagcaagtagtagtggagccacagcaacagctgtgtcagaagatgaagcacatgcaagttaatggcatgtttgaaaattggaactctaaccaattcgtgcctttcaattgtccacagcaagacccacaacaatataatgtctttacagacttacatgggatcagtcaagagttcccctacaaatctgaaatggattctatgccttatacacagaactttatttcctgtaatcagcctgtattaccacaacattccaaatgtacagagctggactaccctatggggagttttgaaccatccccataccccactacttctagtttagaagattttgtcacttgtttacaacttcctgaaaaccaaaagcatggattaaatccacagtcagccataataactcctcagacatgttatgctggggccgtgtcgatgtatcagtgccagccagaacctcagcacacccacgtgggtcagatgcagtacaatccagtactgccaggccaacaggcatttttaaacaagtttcagaatggagttttaaatgaaacatatccagctgaattaaataacataaataacactcagactaccacacatcttcagccacttcatcatccgtcagaagccagaccttttcctgatttgacatccagtggattcctgtaa

SEQ ID NO: 496 - DNA, 1761 bp, Homo sapiens
  source 1..1761: mol_type = genomic DNA
atggcagcctctggggtggagaagagcagcaagaagaagaccgagaagaaacttgctgctcgggaagaagctaaattgttggcgggtttcatgggcgtcatgaataacatgcggaaacagaaaacgttgtgtgacgtgatcctcatggtccaggaaagaaagatacctgctcatcgtgttgttcttgctgcagccagtcatttttttaacttaatgttcacaactaacatgcttgaatcaaagtcctttgaagtagaactcaaagatgctgaacctgatattattgaacaactggtggaatttgcttatactgctagaatttccgtgaatagcaacaatgttcagtctttgctggatgcagcaaaccaatatcagattgaacctgtgaagaaaatgtgtgttgattttttgaaagaacaagttgatgcttcaaattgtcttggtataagtgtgctagcggagtgtctagattgtcctgaattgaaagcaactgcagatgactttattcatcagcactttactgaagtttacaaaactgatgaatttcttcaacttgatgtcaagcgagtaacacatcttctcaaccaggacactctgactgtgagagcagaggatcaggtttatgatgctgcagtcaggtggttgaaatacgatgaacctaatcgccagccatttatggttgatatccttgctaaagtcaggtttcctcttatatcaaagaatttcttaagtaaaacggtacaagctgaaccacttattcaagacaatcctgaatgccttaagatggtgataagtggaatgaggtaccatctactgtctccagaggaccgagaagaacttgtagatggcacaagacctagaagaaagaaacatgactaccgcatagccctatttggaggctctcaaccacagtcttgtagatattttaacccaaaggattatagctggacagacatccgctgcccctttgaaaaacgaagagatgcagcatgcgtgttttgggacaatgtagtatacattttgggaggctctcagcttttcccaataaagcgaatggactgctataatgtagtgaaggatagctggtattcgaaactgggtcctccgacacctcgagacagccttgctgcatgtgctgcagaaggcaaaatttatacatctggaggttcagaagtaggaaactcagctctgtatttatttgagtgctatgatacgagaactgaaagctggcacacaaagcccagcatgctgacccagcgctgcagccatgggatggtggaagccaatggcctaatctatgtttgtggtggaagtttaggaaacaatgtttctgggagagtgcttaattcctgtgaagtttatgatcctgccacagaaacatggactgagctgtgtccaatgattgaagccaggaagaatcatgggctggtatttgtaaaagacaagatatttgctgtgggtggtcagaatggtttaggtggtctggacaatgtggaatattacgatattaagttgaacgaatggaagatggtctcaccaatgccatggaagggtgtaacagtgaaatgtgcagcagttggctctatagtttatgtcttggctggttttcagggtgttggtcgattaggacacattctcgaatataataccgaaacagacaaatgggttgccaactccaaagttcgtgcttttccagtcacaagttgtttaatttgtgttgtcgatacttgtggagcaaatgaagagacccttgaaacatga

SEQ ID NO: 497 - DNA, 666 bp, Homo sapiens
  source 1..666: mol_type = genomic DNA
atgtcgtcccggcctgggcgcgaggacgtgggggctgcgggcgcgcggcggccgcgtgagccgccggagcaggagctgcagcgacgtcgggagcagaagcggcggcgacacgacgcgcagcagctgcagcagctcaagcacctggagtccttttacgaaaaacctcctcctgggcttatcaaggaagatgagactaagccagaagattgcataccagatgtaccaggcaatgaacacgccagggaatttctggctcatgcaccaactaaaggactttggatgccactggggaaagaagtcaaagttatgcagtgttggcgttgcaaacgctatggtcaccgaacgggtgacaaagaatgccctttctttatcaaaggcaaccaaaagttagagcagttcagagtggcacatgaagatcccatgtatgacatcatacgagacaataaacgacatgaaaaggacgtaaggatacagcagttaaaacagttactggaggattctacctcagatgaagataggagcagctccagttcctctgaaggtaaagagaaacacaagaaaaagaagaagaaagaaaagcataagaaaaggaagaaagaaaagaaaaagaagaaaaaacggaagcacaaatcttccaagtcaaatgagggttctgactcagagtga

SEQ ID NO: 498 - DNA, 2664 bp, Homo sapiens
  source 1..2664: mol_type = genomic DNA
atgtctttatttaaagcccgtgattggtggtctactattctgggagataaagaagaatttgatcaaggctgtttgtgtctggctaatgttgacaatagtggaaatggacaagataaaataattgtgggtagctttatgggatacctaaggatctttagcccccatcctgcaaaaacaggagatggagctcaagccgaagatttgcttctagaagtggatctacgagatccagtacttcaagtggaagtaggaaagtttgtttcaggtaccgaaatgctacatttggctgtgttacattctagaaaactttgtgtctactctgtctcaggaaccttgggtaatgtggaacatgggaaccaatgtcagatgaaattgatgtatgaacataatcttcagagaacagcctgcaatatgacctatggatcatttggtggtgtaaaaggtcgagatttaatttgcatccagtctatggatgggatgctgatggtatttgagcaggagagctatgcttttggaagatttctccctggctttcttctgcctggtcctcttgcctacagttcccgtacagattccttccttactgtctcttcctgccaacaagtggaaagttataagtaccaggtacttgcttttgcaacagatgcagataaaaggcaggagactgaacagcaaaaacttggttctggaaaaagactagttgtggattggactctaaatattggagagcaagcccttgacatatgtattgtctctttcaatcagtcggcatcctctgtttttgttcttggtgagagaaactttttttgccttaaggataatggacaaattcgattcatgaagaagcttgattggagcccaagttgttttctgccatattgctcagtttctgaaggaacaataaatactttgattggaaatcataataacatgctgcatatttatcaagatgtgacactgaagtgggccacccaacttccccacattcctgtagcagtaagagtgggctgtttgcatgatttaaagggagtgatagtcactctgagtgatgatggtcacttgcagtgttcatacctggggacagatccttctctgttccaagctccaaacgttcaatctcgagaactaaactatgatgaacttgatgtagaaatgaaagaacttcagaaaatcatcaaagatgttaacaaatcacaaggtgtttggcccatgactgagagagaagatgacttgaacgtttctgtcgtggtttctcctaactttgattcagtttctcaagcgaccgatgttgaggtgggaactgaccttgtcccttctgtcacggtgaaggtcacactgcagaacagagtgatattgcaaaaagccaaattatcagtctacgtgcaaccaccattagaattgacttgtgatcagttcacctttgaatttatgacaccagatttgactagaacagtaagcttttctgtttatctgaaaagaagttatacaccatcagaattggaaggaaatgctgttgtttcttattccagaccaacagatcgaaatcctgatggcattccgcgagttatccaatgtaaatttagacttcccctaaagttaatttgcctaccaggtcagccttcaaaaactgcaagccacaaaattactattgataccaacaaatctccagtcagtcttcttagtctcttcccaggttttgccagtcagtcagatgatgatcaggtgaatgtaatgggttttcacttcttaggaggtgctcgaattactgttcttgcttccaaaacttctcaacgatatcgcattcagagtgaacaatttgaagatctttggctcataaccaatgagcttattcttcgccttcaagaatattttgaaaaacagggagtcaaagattttgcatgttctttttcgggatctataccccttcaagaatattttgagttgattgatcatcattttgagctacggataaatggtgaaaaattagaagaactcttatctgagagagctgtacaatttcgggccattcaacgccggctactagcaagattcaaagataaaactcctgcccctcttcaacacctggacaccttgttagatggaacctacaagcaggtaattgctctagcagatgcagtggaggaaaaccaaggcaatctgttccagtcattcaccaggctgaagagtgccacccatttggtgattctgctgatcgcgctgtggcagaagcttagtgctgaccaggttgctattctggaagcggcatttctgccgctacaagaagacactcaagaattgggctgggaagaaacggtggatgccgccatttcccacctgttgaagacttgcctgtcgaagagttctaaggagcaggctttgaacctcaacagccagctgaacatacccaaagacacaagccaactgaagaaacatatcaccttgctctgcgatagattatccaaaggtggccgtctctgcctaagtaccgatgcagcagccccacagaccatggtcatgccaggtggttgtactacaatcccagagtcagacctagaagaaagatcagtagaacaagactctacagaactgtttaccaaccacagacatctcactgcagagacacccaggcctgaagtttcacccctccaaggagtctcggaataa

SEQ ID NO: 499 - DNA, 3852 bp, Homo sapiens
  source 1..3852: mol_type = genomic DNA
atgtggggcagcgatcgcctggcgggtgctgggggaggcggggcggcagtgactgtggccttcaccaacgctcgcgactgcttcctccacctgccgcggcgtctcgtggcccagctgcatctgctgcagaatcaagctatagaagtggtctggagtcaccagcctgcattcttgagctgggtggaaggcaggcattttagtgatcaaggtgaaaatgtggctgaaattaacagacaagttggtcaaaaacttggactctcaaatgggggacaggtatttctcaagccatgttcccatgtggtatcttgtcaacaagttgaggtggaacccctctcagcagatgattgggagatactggagctgcatgctgtttcccttgaacaacatcttctagatcaaattcgaatagtttttccaaaagccatttttcctgtttgggttgatcaacaaacgtacatatttatccaaattgttgcactaataccagctgcctcttatggaaggctggaaactgacaccaaactccttattcagccaaagacacgccgagccaaagagaatacattttcaaaagctgatgctgaatataaaaaacttcatagttatggaagagaccagaaaggaatgatgaaagaacttcaaaccaagcaacttcagtcaaatactgtgggaatcactgaatctaatgaaaacgagtcagagattccagttgactcatcatcagtagcaagtttatggactatgataggaagcattttttcctttcaatctgagaagaaacaagagacatcttggggtttaactgaaatcaatgcattcaaaaatatgcagtcaaaggttgttcctctagacaatattttcagagtatgcaaatctcaacctcctagtatatataacgcgtcagcaacctctgtttttcataaacactgtgccattcatgtatttccatgggaccaggaatattttgatgtagagcccagctttactgtgacatatggaaagctagttaagctactttctccaaagcaacagcaaagtaaaacaaaacaaaatgtgttatcacctgaaaaagagaagcagatgtcagagccactagatcaaaaaaaaattaggtcagatcataatgaagaagatgagaaggcctgtgtgctacaagtagtctggaatggacttgaagaattgaacaatgccatcaaatataccaaaaatgtagaagttctccatcttgggaaagtctggattccagatgacctgaggaagagactaaatatagaaatgcatgccgtagtcaggataactccagtggaagttacccctaaaattccaagatctctaaagttacaacctagagagaatttacctaaagacataagtgaagaagacataaaaactgtattttattcatggctacagcagtctactaccaccatgcttcctttggtaatatcagaggaagaatttattaagctggaaactaaagatggactgaaggaattttctctgagtatagttcattcttgggaaaaagaaaaagataaaaatatttttctgttgagtcccaatttgctgcagaagactacaatacaagtccttctagatcctatggtaaaagaagaaaacagtgaggaaattgactttattcttccttttttaaagctgagctctttgggaggagtgaattccttaggcgtatcctccttggagcacatcactcacagcctcctgggacgccctttgtctcggcagctgatgtctcttgttgcaggacttaggaatggagctcttttactcacaggaggaaagggaagtggaaaatcaactttagccaaagcaatctgtaaagaagcatttgacaaactggatgcccatgtggagagagttgactgtaaagctttacgaggaaaaaggcttgaaaacatacaaaaaaccctagaggtggctttctcagaggcagtgtggatgcagccatctgttgtcctgctggatgaccttgacctcattgctggactgcctgctgtcccggaacatgagcacagtcctgatgcggtgcagagccagcggcttgctcatgctttgaatgatatgataaaagagtttatctccatgggaagtttggttgcactgattgccacaagtcagtctcagcaatctctacatcctttacttgtttctgctcaaggagttcacatatttcagtgcgtccaacacattcagcctcctaatcaggaacaaagatgtgaaattctgtgtaatgtaataaaaaataaattggactgtgatataaacaagttcaccgatcttgacctgcagcatgtagctaaagaaactggcgggtttgtggctagagattttacagtacttgtggatcgagccatacattctcgactctctcgtcagagtatatccaccagagaaaaattagttttaacaacattggacttccaaaaggctctccgcggatttcttcctgcgtctttgcgaagtgtcaacctgcataaacctagagacctgggttgggacaagattggtgggttacatgaagttaggcagatactcatggatactatccagttacctgccaagtatccagaattatttgcaaacttgcccatacgacaaagaacaggaatactgttgtatggtccgcctggaacaggaaaaaccttactagctggggtaattgcacgagagagtagaatgaattttataagtgtcaaggggccagagttactcagcaaatacattggagcaagtgaacaagctgttcgggatatttttattagagcacaggctgcaaagccctgcattcttttctttgatgaatttgaatccattgctcctcggcggggtcatgataatacaggagttacagaccgagtagttaaccagttgctgactcagttggatggagtagaaggcttacagggtgtttatgtattggctgctactagtcgccctgacttgattgaccctgccctgcttaggcctggtcgactagataaatgtgtatactgtcctcctcctgatcaggtgtcacgtcttgaaattttaaatgtcctcagtgactctctacctctggcagatgatgttgaccttcagcatgtagcatcagtaactgactcctttactggagctgatctgaaagctttactttacaatgcccaattggaggccttacatggaatgctgctctcgagtggactccaggatggaagttccagctctgatagtgacctaagtctgtcttcaatggtctttcttaaccatagcagtggctctgacgattcagctggagatggagaatgtggcttagatcagtcccttgtttctttagagatgtccgagatccttccagatgaatcaaaattcaatatgtaccggctctactttggaagctcttatgaatcagaacttggaaatggaacctcttctgatttgagctcacaatgtctctctgcaccaagctccatgactcaggatttgcctggagttcctgggaaagaccagttgttttcacagcctccagtgttaaggacagcttcacaagagggttgccaagaacttacacaagaacaaagagatcaactgagggcagatatcagtattatcaaaggcagataccggagccaaagtggagaggacgaatccatgaaccaaccaggaccaatcaaaaccagactggctattagtcagtcacatttaatgactgcacttggtcacacaagaccatccattagtgaagatgactggaagaattttgctgagctatatgaaagctttcaaaatccaaagaggagaaaaaatcaaagtggaacaatgtttcgacctggacagaaagtaactttagcataa

SEQ ID NO: 500 - DNA, 918 bp, Homo sapiens
  source 1..918: mol_type = genomic DNA
atggccagagaagattccgtgaagtgtctgcgctgcctgctctacgccctcaatctgctcttttggttaatgtccatcagtgtgttggcagtttctgcttggatgagggactacctaaataatgttctcactttaactgcagaaacgagggtagaggaagcagtcattttgacttactttcctgtggttcatccggtcatgattgctgtttgctgtttccttatcattgtggggatgttaggatattgtggaacggtgaaaagaaatctgttgcttcttgcatggtactttggaagtttgcttgtcattttctgtgtagaactggcttgtggcgtttggacatatgaacaggaacttatggttccagtacaatggtcagatatggtcactttgaaagccaggatgacaaattatggattacctagatatcggtggcttactcatgcttggaatttttttcagagagagtttaagtgctgtggagtagtatatttcactgactggttggaaatgacagagatggactggcccccagattcctgctgtgttagagaattcccaggatgttccaaacaggcccaccaggaagatctcagtgacctttatcaagagggttgtgggaagaaaatgtattcctttttgagaggaaccaaacaactgcaggtgctgaggtttctgggaatctccattggggtgacacaaatcctggccatgattctcaccattactctgctctgggctctgtattatgatagaagggagccggggacagaccaaatgatgtccttgaagaatgacaactctcagcacctgtcatgtccctcagtagaactgttgaaaccaagcctgtcaagaatctttgaacacacatccatggcaaacagctttaatacacactttgagatggaggagttataa

SEQ ID NO: 501 - DNA, 1692 bp, Homo sapiens
  source 1..1692: mol_type = genomic DNA
atggaggggccactcactccaccaccgctgcagggaggcggagccgccgctgttccggagcccggagcccggcaacacccgggacacgagacggcggcgcagcggtacagcgcccgactgctgcaggccggctacgagcccgagagcatggcggactacctgatcagcggcggcaccggctacgtgcccgaggatgggctcaccgcgcagcagctcttcgccagcgccgacggcctcacctacaacgacttcctgattctcccaggattcatagacttcatagctgatgaggtggacctgacctcagccctgacccggaagatcacgctgaagacgccactgatctcctcccccatggacactgtgacagaggctgacatggccattgccatggctctgatgggaggtattggtttcattcaccacaactgcaccccagagttccaggccaacgaggtgcggaaggtcaagaagtttgaacagggcttcatcacggaccctgtggtgctgagcccctcgcacactgtgggcgatgtgctggaggccaagatgcggcatggcttctctggcatccccatcactgagacgggcaccatgggcagcaagctggtgggcatcgtcacctcccgagacatcgactttcttgctgagaaggaccacaccaccctcctcagtgaggtgatgacgccaaggattgaactggtggtggctccagcaggtgtgacgttgaaagaggcaaatgagatcctgcagcgtagcaagaaagggaagctgcctatcgtcaatgattgcgatgagctggtggccatcatcgcccgcaccgacctgaagaagaaccgagactaccctctggcctccaaggattcccagaagcagctgctctgtggggcagctgtgggcacccgtgaggatgacaaataccgtctggacctgctcacccaggcgggcgtcgacgtcatagtcttggactcgtcccaagggaattcggtgtatcagatcgccatggtgcattacatcaaacagaagtacccccacctccaggtgattggggggaacgtggtgacagcagcccaggccaagaacctgattgatgctggtgtggacgggctgcgcgtgggcatgggctgcggctccatctgcatcacccaggaagtgatggcctgtggtcggccccagggcactgctgtgtacaaggtggctgagtatgcccggcgctttggtgtgcccatcatagccgatggcggcatccagaccgtgggacacgtggtcaaggccctggcccttggagcctccacagtgatgatgggctccctgctggccgccactacggaggcccctggcgagtacttcttctcagacggggtgcggctcaagaagtaccggggcatgggctcactggatgccatggagaagagcagcagcagccagaaacgatacttcagcgagggggataaagtgaagatcgcgcagggtgtctcgggctccatccaggacaaaggatccattcagaagttcgtgccctacctcatagcaggcatccaacacggctgccaggatatcggggcccgcagcctgtctgtccttcggtccatgatgtactcaggagagctcaagtttgagaagcggaccatgtcggcccagattgagggtggtgtccatggcctgcactcttacgaaaagcggctgtactga

SEQ ID NO: 502 - DNA, 1038 bp, Homo sapiens
  source 1..1038: mol_type = genomic DNA
atgtcggaggaagagttttatctgttcaaaaatatctcttcagtggggccgtgggatgggcctcagtaccacattgcccctgtctgggccttctacctccaggcagctttcatgggcactgtcttccttatagggttcccactcaatgccatggtgctggtggccacactgcgctacaaaaagttgcggcagcccctcaactacattctggtcaacgtgtccttcggaggcttcctcctctgcatcttctctgtcttccctgtcttcgtcgccagctgtaacggatacttcgtcttcggtcgccatgtttgtgctttggagggcttcctgggcactgtagcaggtctggttacaggatggtcactggccttcctggcctttgagcgctacattgtcatctgtaagcccttcggcaacttccgcttcagctccaagcatgcactgacggtggtcctggctacctggaccattggtattggcgtctccatcccacccttctttggctggagccggttcatccctgagggcctgcagtgttcctgtggccctgactggtacaccgtgggcaccaaataccgcagcgagtcctatacgtggttcctcttcatcttctgcttcattgtgcctctctccctcatctgcttctcctacactcagctgctgagggccctgaaagctgttgcagctcagcagcaggagtcagctacgacccagaaggctgaacgggaggtgagccgcatggtggttgtgatggtaggatccttctgtgtctgctacgtgccctacgcggccttcgccatgtacatggtcaacaaccgtaaccatgggctggacttacggcttgtcaccattccttcattcttctccaagagtgcttgcatctacaatcccatcatctactgcttcatgaataagcagttccaagcttgcatcatgaagatggtgtgtgggaaggccatgacagatgaatccgacacatgcagctcccagaaaacagaagtttctactgtctcgtctacccaagttggccccaactga

SEQ ID NO: 503 - DNA, 5853 bp, Homo sapiens
  source 1..5853: mol_type = genomic DNA
atgccgggggcgcggcgccgacgccgaggcgcggccatggaggggaagccccgcgccggggtcgcgctggccccggggccgagcggccgacggccttccgcccgctgcgcccgccgccgccgcccggggctgctgcttcctggcctctggctgctgctgctggcccggccggcctcgtgcgccccagatgagctctctccggaacagcacaacctttctttatactccatggagctcgtgctgaagaaaagcactgggcacagcgctgcacaagtggccttaacagaaactgctcccggctcccagcacagcagtcctctccatgtcacagccccgccgtctgccactacttttgatacagccttttttaaccaaggaaaacagaccaaaagtacagcagatcccagcatctttgtggcaacttacgtgtcagtgacgagtaaagaggtggccgtcaatgacgatgagatggataactttctgccagatactcactggaccactccacggatggtttctccaatacagtatatcacagtcagcccaccagggctgcccagggaagcattagaacctatgctcactccatcattacccatggtttctttacaagatgaagaagtgacatcgggctggcagaacacaacgcgacaaccagcggcatatgctgagtccgccagtcatttccacacctttcggtcagcttttcgcacctctgagggcatcgttccaactcctggcaggaatttggtgctttatcctactgatgcttacagtcatttatcaagcaggactctgccagagattgtggcttccctaacagagggtgtggaaaccaccctttttttaagctcccggtctttaatgccacagccgttaggcgacggcattactataccgttgccctccttgggggaggtctcacagcctccagaggaggtttgggccacaagtgcagacagatacactgatgtgaccactgtgttgagtcaaagcctagaagaaaccatctctccaagaacataccccactgtgactgcatcgcacgcagcccttgcattcagcaggacacattctccattgctttcaactcctcttgcatttgcgtcctctgcttcaccaactgatgtttcatctaacccctttctccctagcgactccagcaaaacatccgaattgcatagcaattcagccctccccggtcctgtggacaacactcatatcctgagcccggtgtcctcattcagaccatacacttggtgtgcggcctgcactgtgccttcacctcagcaagttctggccacgagcctcatggagaaagacgtgggatcaggggatggtgccgagactctgtgcatgaccgtgctggaagaaagcagcatctctctaatgagtagcgtcgtagcagacttctctgaatttgaggaagatcctcaagtatttaatacgcttttcccctccagacctatcgtcccactttcttctagatccatggaaatctcagagacgagtgttggcatttctgccgaggtggatatgagtagtgttacaaccacacaggttccccctgcccacggccgcctctctgtgccggcgtcacttgatcctactgctggctccttgtctgttgctgaaacccaagtgacgccatccagcgtgaccactgcatttttctcggtcatcaccagcattctccttgactcatctttctctgtcatagcaaacaaaaacacaccgtcgcttgccgtcagagacccgagtgtttttacgccttatagtctggttccttcagtggagtcttcacttttctctgaccaagaacgttccagtttttctgagcataaacccagaggtgctttggattttgcatccagctttttctcaacacccccgctggaactcagcggctccatctcttcgccttcggaagcacctgcgtctctgtctctgatgccgagtgacttgtcccccttcacatctcagtctttttctcccttggttgagacatttacattgtttgactctagtgatctgcagtcatctcagctgtctcttcccagttccacaaatcttgagttttcgcagctccagccaagttccgagctgcctttaaacaccatcatgttgctacctagccgttctgaggtgtcaccatggtcaagcttcccttctgattctctcgagtttgttgaagcgtctacggtttcactgacggattcagaagctcattttacctcagctttcattgaaactacctcctatcttgagtcttcactcatttcccatgaatccgcagtcactgcactggtgccccccggctctgagtcttttgacattttgactgccgggattcaagcaacatcaccattgaccactgtccacacaacgcccattttaactgagtcttctttgttctcaactctgacacctcctgacgaccaaatcagtgctctagacggtcacgtgtctgtcctggcctctttctccaaagccattcccactggtacggtgttgatcactgacgcgtacctgccatcaggatcctcgtttgtttctgaagcaacccccttccctctgcccacagagctgaccgtcgtgggcccatcactcacacccacagaggtgccactgaacacctccacggaagtgagcacaaccagcaccggtgctgccactggtggtcccctcgactccaccctgatgggtgacgccgcaagtcagagccccccagagagtagtgctgctcctcccctgccatccctgcgtcccgtgactgccttcactctcgaagcaacagtcgacacaccaacactggctactgccaagccgccatatgtttgtgatatcacagtccccgatgcctatctgatcacaactgtgctggccagaagagctgtgcaggagtacatcattacagcaatcaaagaagtactgaggattcacttcaaccgtgcagtggaactgaaggtttacgaactatttactgacttcacttttctggtaacatccggtcctttcgtttacacggcaatatccgtcataaatgtgcttataaacagtaagcttgtccgtgaccagactcctttaatcctgtctgtgaaaccttctttccttgtgccagagtccaggttccaagttcaaacagtacttcagtttgtgcctccgagtgtggatactggcttctgcaacttcacccagcgcattgagaaaggcctaatgacagctctctttgaagtgagaaaacaccaccagggaacgtataacctcacggtgcagatcttgaatatcaccatcagttcctcaagggtgactcctcggcggggcccggtgaatatcatctttgcggttaaaagcacacagggatttttgaatgggtcggaagtgagcgagctgctcagaaacttgagtgtggtggagttcagtttctatctgggatacccagtgctgcagatcgcagagcccttccagtatccacagctcaacttatctcagttgctgaagtcctcttgggtcagaacagttctcctgggcgtcatggagaagcaactccagaatgaagtgtttcaagccgagatggaacgcaagctggcccagctgctcagcgaggtttccaccagaaggcggatgtggagaagggccactgtagctgcagggaacagtgtggtgcaggtggtaaatgtgtcgaggctggagggagatgacaatccggtacagctcatctactttgtggaggatcaagatggagaaagactcagtgcagtcaagtcttcggacctgattaacaaaatggacctccagagagcagccatcatcttgggttaccgaattcaaggtgtcattgcccagcctgtcgacagggtgaagaggccgtctccggaatcccagagcaacaacttgtgggtcattgttggcgtggtcatcccagtgctggtggtgatggtgattgttgtcatcctctactggaaactatgccgcacagacaagctagactttcagcctgacactgtggccaacattcagcagcgtcagaagctgcagatccctagtgtgaagggcttcgattttgctaagcagcatctgggtcagcacaataaagacgacatattgattattcatgagccagcgccactgccaggacctctgaaggaccacaccacgccctcggaaaatggagacgtgccaagccccaagtcaaagatcccttccaagaatgttcgtcacagaggaagagtttctccctcagatgctgactctacggtcagtgaagagtccagcgagagggacgcaggagataagacgccgggagccgtcaacgatggcaggtcccacagagctccgcagagcgggccaccactgcccagttcgggaaatgagcagcactcatcagcctccatcttcgagcacgtggacaggatctcccgccccccggaggctagccggcgggtccccagtaagatccagcttatcgccatgcagccgatcccggcacctcccgtccagcgcccctccccagccgaccgagtggcggaaagcaataaaatcaacaaagagattcagaccgcgctgcggcacaagtctgagatcgagcaccatcgcaacaagatccgcctgcgcgccaagcgccgcgggcactacgagttcccggtggtagacgacctgtcctcgggcgacactaaggagcgacaccgggtgtaccgcagggcacagatgcagatcgacaagatcctggaccccacggccagcgtgccctccgtgttcatagagcccaggaagagctcacggataaaacgttctcccaagcctcgccggaaacaccaggtcaacggctgtcctgccgacgctgagaaggaccggctcatcaccacagacagcgatggcacctacaggaggccccccggcgtccacaactcagcctacatcggatgcccatcggatcctgacctcccagccgatgtgcagacaccatcctcggtggaactggggaggtatccagcccttcccttcccggcctcccagtacatcccaccccagccgtccatcgaggaggcacgccagaccatgcactccctcctggacgacgcctttgccctcgtggcccccagcagccagcctgccagcaccgcaggtgtaggccccggagtcccacccggcctgcccgcaaacagcaccccttcccaggaagagaggcgagccacccagtgggggtccttctacagcccagcccagacggccaacaatccctgcagtagatacgaagactatggaatgactcccccgacgggtccattgccaagaccaggttttggccccggtttgctgcagtctacagagctggtgccccctgaccctcagcagccacaggcctccgccgaagccccatttgctgccagagggatctactcggaggagatgccgtcggtggcccggcctcggcctgtcgggggtaccacaggctcccagatccagcacctgacacaggtggggattgccagcagaattggagctcagccagtggaaatcccgccaagcagaggcagccagtatggggggccaggctggccttcgtacggggaggacgaagcggggcgaagagaggccacacacatgctcggacatcaagagtattcttcttcaccgctatttcaggtgccaaggacttcaggcagggagccctcagctccttccgggaacctcccccaccggggactgcagggccctgggctgggttaccccaccagctccacggaagacctccagcctggccactcctcggcctctctcatcaaagcaatccgcgaggagctcctccggctctcccagaaacagagcaccgtgcagaacttccacagctga

SEQ ID NO: 504 - DNA, 7203 bp, Homo sapiens
  source 1..7203: mol_type = genomic DNA
atgaacagcacccccaggaatgcccaggccccgagccaccgtgagtgcttcctgccctctgtggctcgcaccccctcggtcaccaaggtcacgccagccaagaagatcaccttcctcaagcgaggggatccacggtttgctggggtccgcctggccgttcaccagcgcgcctttaagaccttcagcgccctcatggacgagctctcccagcgcgtgcctctctcctttggggtgcgctctgtcaccacaccccggggcctgcatagcctcagcgccctggagcagctggaagatggaggctgctacctctgctctgataagaagccccccaagacccccagtggaccaggccggccacaggagagaaaccccactgctcagcagttgcgggatgtcgaaggccagcgtgaagccccaggcacctcctcctcccggaagagtcttaaaaccccccggaggatactgctgattaagaacatggaccctcgcctccagcagacagtggttctcagtcacaggaatactaggaacctggccgcctttctcggcaaagcctcagatctcctgcgctttcctgtgaagcagttgtacacgaccagcgggaaaaaggtggactcgctgcaggccctgctgcacagcccctctgtgctggtgtgtgccgggcatgaggccttcagaaccccagccatgaaaaatgccaggagaagcgaggctgaaactttatctgggctgacttcaagaaacaaaaacgggagctgggggccaaagaccaagccgagtgtgatccattcgcggtctccgccaggcagcacgccacggctgccagaaaggcctggtcctagcaaccccccggtgggccctgctcctggcaggcaccctcaggacacgccagctcagtcgggcccgctggtggctggcgatgacatgaagaagaaggtccgcatgaatgaggacggcagcctgtccgtggagatgaaagtccgcttccacctggtcggcgaggacacgctcctatggtcccggaggatgggcagggccagcgccctcacggcagccagtggggaagaccccgttctgggggaggtagaccccctctgctgtgtgtgggagggctacccttggggcttctcagagcctggggtgtggggaccccggccctgcagggtgggatgcagggaagtctttggccgaggcgggcagccagggcccaagtatgaaatctggacgaatcccctgcatgcctcccagggagagagagtggcagctcggaagaggtggggactggcccagcacgtccgctgcagtggcctgtggggccacgggactgccgggagggagagatgcagccaggacagtgccagcccagcctccagcaccggcctccccgagggctcggagccagagtcctcctgctgccccaggaccccggaggacggggtggacagtgccagcccctctgcccagataggggctgagcggaaagctggagggagcctgggtgaggaccccggcctatgcatagatggagcagggctgggcggcccagagcaaggcggccgcctgacaccgagggcccggagtgaggagggggcttcttcggactcgtcagccagcaccggctctcatgagggatccagcgaatggggtgggcggccccagggctgtccaggcaaggcaagggccgagacctctcagcaggaggccagcgagggaggcgaccccgcttctccagccctgagtctttcatctttaaggagtgacgacctgcaggcagagacgcaaggacagggcaccgagcaggccacgggagcggctgtgacaagggagcctctggttctgggcctttcctgctcctgggactcggaaggagcctcttccaccccttccacctgcacttcatcccagcaggggcagagaaggcacagaagccgggccagtgcaatgtcctcacccagcagccctggccttggccgagtggccccgagaggccatcccaggcattctcactaccgcaaggacacccacagcccactggactcctctgtaaccaagcaagtgccgaggcctcctgagcggcgaagggcctgccaggatggctcagtgccacgatattctggaagctcatcgagcaccaggacacaggcctctgggaacctgagacctccctcctcgggctctcttccttcccaggaccttctgggaaccagcagtgccactgtcacccctgcagtccactcggattttgtttctggagtctccccgcacaacgctccctctgccgggtgggcaggggacgcggggtccaggacatgctcgccggcccccatacctccccacacatccgactcctgctcaaaatctggggctgccagcctgggggaagaggccagggacacgcctcagccctcctcacccttggttctgcaggttggacggcctgagcaaggggcggtgggcccccaccgaagccactgctgctcacagcctgggacgcagccggcccaagaggcccagcggggaccctcccctgaggctagctggctgtgtggcaggtactgtcccaccccgcccagggggcggccctgcccccagaggcgctcttccagctgtgggagcaccggcagcagccaccaaagcactgcccgggggccaggtgggagcccgcaggaggggacacgccagccaggccccacgccgtccccaggccccaattcaggggcatcaaggagaagcagtgccagccagggtgcggggtctcgggggctgtccgaggagaagaccttgaggagtgggggaggcccccaggggcaggaggaggccagtggtgtgtcacccagctctctgccccgctcgtctccagaggctgtggtccgcgaatggctggacaacattccagaagagcccatactcatgacatatgagttggcggacgagaccacaggtgcagctgggggtggcctgagaggccccgaggtggaccctggggatgaccattctctggaaggcctgggggagccagctcaggcgggacagcagtccctggaaggggaccccggccaggacccagagccagagggagccctcctggggagtagtgacactggtccccaatcaggagagggtgtcccccaaggggcagctccagagggagtttccgaggcccctgcagaggccggagcagacagagaggccccagcaggctgcagggtgagcctgcgggcacttcctggccgggtgtctgcctccacgcagatcatgagggcgctgatgggctccaagcagggccggcccagcagcgtgcccgaagtgtctaggcccatggccaggaggctcagctgctcagccggggccctcattacttgtctggccagtctgcagttatttgaggaagaccttgggtctcctgccagcaaagtgaggttcaaagactcccctcggtaccaggagctgctcagcatctcgaaggacctgtggccaggatgtgacgttggggaagaccagctggactcaggcctctgggagctcacatggagccaggctctgccagaccttgggtcccatgccatgacggagaacttcacgcccacatcctcctctggtgtggacatcagcagcggctctggaggctcaggggagagtagcgtaccctgtgccatggacggcaccctggtgacacaggggacagagctgcccctgaaaacctccaaccagaggcctgattcaagaacttatgagagcccaggggatctggaaaaccaacagcagtgttgtttcccaaccttcttgaacgcccgagcctgcgcttgtgccaccaatgaggatgaagcagaaagagacagtgaggagcagagggcgagctcgaacctggagcagttagctgaaaacacagtgcaagaagaggtgcaattagaggaaactaaagaaggaacagaaggagaagggctgcaagaagaggcggtgcagttagaggaaactaaaacagaagaagggctgcaagaagagggggtgcagttagaggaaactaaagaaacagaaggagaaggacagcaagaagaagaggcgcagttagaggaaattgaagaaacaggaggagaagggctgcaagaagagggggtgcagttagaggaagttaaagaagggccagaaggaggactgcaaggagaggctcttgaagagggtctcaaagaggaaggacttccagaagaaggaagcgtccacgggcaggaattgtcagaggccagctctccggatgggaaaggctcccaggaagatgacccagtccaggaggaggaagcaggaagagcctctgcctctgcagagccgtgccccgcagagggcacagaggaacccacagagccccctagtcatctcagcgagacggacccaagtgccagcgagaggcagagtggctcccagcttgagcctggtttggaaaagccgcccggagccaccatgatgggccaagagcacacgcaggcccaacccacccagggggctgcagagaggagctcttcggtggcctgcagcgcggctctggactgcgaccccatctgggtgtccgtgttactgaagaagacggagaaggccttcctggcccaccttgccagtgcggtggctgagctccgagcacgctggggcctgcaggacaatgatctgctggaccagatggcggccgagctgcagcaggacgtggcccaacgcctccaggacagcaccaagagagagctccagaagctccagggccgggcgggtaggatggtgctggagcctccaagggaggccctcaccggggagctgctcctgcagacccagcagcgcagacaccgtctccggggcctgcgaaacctctcggccttctctgagcggaccctgggcctggggcccctctccttcaccctggaggacgagccagccctcagcacagccctggggagccagctgggcgaggaggcggagggggaggagttctgtccctgcgaggcctgcgtgaggaagaaagtgagccctatgtcccccaaggccacaatgggggcaaccagaggtcccatcaaagaggcctttgacctgcagcagattctgcagaggaagaggggagaacacactgatggggaggcagcagaggtggcccctggcaagacccacacggaccccacgagcactaggactgtccagggagctgagggagggctggggccggggctgagccaggggcctggagtggacgagggtgaggatggcgaggggagccagagactcaacagagacaaagatcccaaactcggggaggcagagggagatgcaatggctcaggagagagaagggaaaacccacaacagtgaaaccagtgcgggcagtgagttgggggaagctgagcaggagggagagggcataagtgaaaggggagaaactgggggtcaaggctctgggcatgaggacaacttgcagggtgaagctgcggcaggaggtgaccaagatccaggacagagtgatggggccgaaggcatagaggccccggaggctgaaggggaggcccagccagagtcagaaggtgtagaggccccagaggcagaaggggatgcccaggaggctgaaggggaggcccagccagagtcagaagatgtagaggccccagaggcagaaggagaggcccagccagagtcagaagatgtagagaccccagaggcagaatgggaggtccagccagagtcagaaggtgcagaagccccggaggcagaaaaggaggcccagccagagacagaaagtgtagaggccctggagactgaaggggaggacgagccagagtcagaaggtgcagaggcccaagaggcagaagaggcggcccaggaggcagaagggcagacccagccagagtcagaagttatagagtcccaggaggcagaagaggaagcccagccagagtcagaagatgtagaggccctggaggttgaagtggagacccaggaggcagaaggggaggcccagccagagtcagaagatgtagaggccccagaggctgaaggggagatgcaagaggcagaagaggaggcccagccagagtcagacggtgtagaggcccagccaaagtcagaaggtgaagaggcccaggaggttgaaggggagacccagaagacagaaggggatgcccagccagagtcagacggtgtagaggccccggaggcagaagaggaggcacaggaggctgaaggggaggtccaggaggcagaaggggaggcccacccagagtcagaagatgtagatgcccaggaggcagaaggggaggcccagccagaatcagaaggtgtagaggccccagaggcagaaggggaggcccagaaggcagaaggtatagaggccccagagactgaaggggaggcccagccagagtcagaaggtatagaggccccagaggctgaaggggaggcccagcctgagtcagaaggtgtagaggcccaggatgcagaaggggaggcccagccagagtcagaaggtatagaggcccaggaggctgaagaggaggcccaaccagagttagaaggtgtagaggccccagaggcagaaggggaggcccagccagagtcagaaggtatagaggccccagaggcagaaggggaggcccaaccagagttagaaggtgtagaggccccggaggctgaagaggaggcccagccagagccagaaggcgtagagaccccggaggctgaaggggaggcccagccagagtcagaaggagaaactcaaggtgagaaaaaggggagccctcaggtcagtctaggagatggccaatctgaggaggcttctgaaagcagcagcccagtccctgaggacaggcccactccacccccttccccaggtggagacactccccaccaaaggccaggctcccaaacaggcccttcctcctccagagcatcctcttggggcaactgctggcagaaagactcagaaaatgaccatgtacttggagacacaaggagccctgatgccaagtccacggggacccctcatgcagagaggaaggccaccaggatgtacccagaaagttctacttctgagcaagaagaggcccctttgggctcaaggactccagagcagggggccagtgaaggttatgacctacaagaggaccaggcactcggaagtctcgcccccactgaggcagtgggcagggcagacggctttggccaagatgacttagatttctag

SEQ ID NO: 505 - DNA, 2460 bp, Homo sapiens
  source 1..2460: mol_type = genomic DNA
atggggtctggcgcgcgctttccctcggggacccttcgtgtccggtggttgctgttgcttggcctggtgggcccagtcctcggtgcggcgcggccaggctttcaacagacctcacatctttcttcttatgaaattataactccttggagattaactagagaaagaagagaagcccctaggccctattcaaaacaagtatcttatgttattcaggctgaaggaaaagagcatattattcacttggaaaggaacaaagaccttttgcctgaagattttgtggtttatacttacaacaaggaagggactttaatcactgaccatcccaatatacagaatcattgtcattatcggggctatgtggagggagttcataattcatccattgctcttagcgactgttttggactcagaggattgctgcatttagagaatgcgagttatgggattgaacccctgcagaacagctctcattttgagcacatcatttatcgaatggatgatgtctacaaagagcctctgaaatgtggagtttccaacaaggatatagagaaagaaactgcaaaggatgaagaggaagagcctcccagcatgactcagctacttcgaagaagaagagctgtcttgccacagacccggtatgtggagctgttcattgtcgtagacaaggaaaggtatgacatgatgggaagaaatcagactgctgtgagagaagagatgattctcctggcaaactacttggatagtatgtatattatgttaaatattcgaattgtgctagttggactggagatttggaccaatggaaacctgatcaacatagttgggggtgctggtgatgtgctggggaacttcgtgcagtggcgggaaaagtttcttatcacacgtcggagacatgacagtgcacagctagttctaaagaaaggttttggtggaactgcaggaatggcatttgtgggaacagtgtgttcaaggagccacgcaggcgggattaatgtgtttggacaaatcactgtggagacatttgcttccattgttgctcatgaattgggtcataatcttggaatgaatcacgatgatgggagagattgttcctgtggagcaaagagctgcatcatgaattcaggagcatcgggttccagaaactttagcagttgcagtgcagaggactttgagaagttaactttaaataaaggaggaaactgccttcttaatattccaaagcctgatgaagcctatagtgctccctcctgtggtaataagttggtggacgctggggaagagtgtgactgtggtactccaaaggaatgtgaattggacccttgctgcgaaggaagtacctgtaagcttaaatcatttgctgagtgtgcatatggtgactgttgtaaagactgtcggttccttccaggaggtactttatgccgaggaaaaaccagtgagtgtgatgttccagagtactgcaatggttcttctcagttctgtcagccagatgtttttattcagaatggatatccttgccagaataacaaagcctattgctacaacggcatgtgccagtattatgatgctcaatgtcaagtcatctttggctcaaaagccaaggctgcccccaaagattgtttcattgaagtgaattctaaaggtgacagatttggcaattgtggtttctctggcaatgaatacaagaagtgtgccactgggaatgctttgtgtggaaagcttcagtgtgagaatgtacaagagatacctgtatttggaattgtgcctgctattattcaaacgcctagtcgaggcaccaaatgttggggtgtggatttccagctaggatcagatgttccagatcctgggatggttaacgaaggcacaaaatgtggtgctggaaagatctgtagaaacttccagtgtgtagatgcttctgttctgaattatgactgtgatgttcagaaaaagtgtcatggacatggggtatgtaatagcaataagaattgtcactgtgaaaatggctgggctcccccaaattgtgagactaaaggatacggaggaagtgtggacagtggacctacatacaatgaaatgaatactgcattgagggacggacttctggtcttcttcttcctaattgttccccttattgtctgtgctatttttatcttcatcaagagggatcaactgtggagaagctacttcagaaagaagagatcacaaacatatgagtcagatggcaaaaatcaagcaaacccttctagacagccggggagtgttcctcgacatgtttctccagtgacacctcccagagaagttcctatatatgcaaacagatttgcagtaccaacctatgcagccaagcaacctcagcagttcccatcaaggccacctccaccacaaccgaaagtatcatctcagggaaacttaattcctgcccgtcctgctcctgcacctcctttatatagttccctcacttga

SEQ ID NO: 506 - DNA, 1908 bp, Homo sapiens
  source 1..1908: mol_type = genomic DNA
atgagcggggcgggcagggcgctggccgcgctgctgctggccgcgtccgtgctgagcgccgcgctgctggcccccggcggctcttcggggcgcgatgcccaggccgcgccgccacgagacttagacaaaaaaagacatgcagagctgaagatggatcaggctttgctactcatccataatgaacttctctggaccaacttgaccgtctactggaaatctgaatgctgttatcactgcttgtttcaggttctggtaaacgttcctcagagtccaaaagcagggaagcctagtgctgcagctgcctctgtcagcacccagcacggatctatcctgcagctgaacgacaccttggaagagaaagaagtttgtaggttggaatacagatttggagaatttggaaactattctctcttggtaaagaacatccataatggagttagtgaaattgcctgtgacctggctgtgaacgaggatccagttgatagtaaccttcctgtgagcattgcattccttattggtcttgctgtcatcattgtgatatcctttctgaggctcttgttgagtttggatgactttaacaattggatttctaaagccataagttctcgagaaactgatcgcctcatcaattctgagctgggatctcccagcaggacagaccctctcgatggtgatgttcagccagcaacgtggcgtctatctgccctgccgccccgcctccgcagcgtggacaccttcagggggattgctcttatactcatggtctttgtcaattatggaggaggaaaatattggtacttcaaacatgcaagttggaatgggctgacagtggctgacctcgtgttcccgtggtttgtatttattatgggatcttccatttttctatcgatgacttctatactgcaacgggggtgttcaaaattcagattgctggggaagattgcatggaggagtttcctgttaatctgcataggaattatcattgtgaatcccaattattgccttggtccattgtcttgggacaaggtgcgcattcctggtgtgctgcagcgattgggagtgacatactttgtggttgctgtgttggagctcctctttgctaaacctgtgcctgaacattgtgcctcggagaggagctgcctttctcttcgagacatcacgtccagctggccccagtggctgctcatcctggtgctggaaggcctgtggctgggcttgacattcctcctgccagtccctgggtgccctactggttatcttggtcctgggggcattggagattttggcaagtatccaaattgcactggaggagctgcaggctacatcgaccgcctgctgctgggagacgatcacctttaccagcacccatcttctgctgtactttaccacaccgaggtggcctatgaccccgagggcatcctgggcaccatcaactccatcgtgatggcctttttaggagttcaggcaggaaaaatactattgtattacaaggctcggaccaaagacatcctgattcgattcactgcttggtgttgtattcttgggctcatttctgttgctctgacgaaggtttctgaaaatgaaggctttattccagtaaacaaaaatctctggtccctttcgtatgtcactacgctcagttcttttgccttcttcatcctgctggtcctgtacccagttgtggatgtgaaggggctgtggacaggaaccccattcttttatccaggaatgaattccattctggtatatgtcggccacgaggtgtttgagaactacttcccctttcagtggaagctgaaggacaaccagtcccacaaggagcacctgactcagaacatcgtcgccactgccctctgggtgctcattgcctacatcctctatagaaagaagattttttggaaaatctga

SEQ ID NO: 507 - DNA, 6471 bp, Homo sapiens
  source 1..6471: mol_type = genomic DNA
atgagtgataccccttctactggtttttccatcattcatcctacgtcttctgaaggtcaagttccaccccctcgccatttgagcctcactcatcctgttgtggccaagcgaatcagtttctacaagagcggagacccccaattcggcggggtcagggtggtggtcaaccctcgctcctttaagtcctttgatgctctgctggataacttgtccaggaaggtgcccctcccttttggagtgaggaacatcagcacccctcggggcaggcacagcatcacgcgcctggaggagctggaggacggcgagtcctacctatgttcccacggcaggaaggtgcagcctgtagacctggacaaagcccgtcggcgcccgcggccctggctcagcagccgggccattagcgcgcactcaccgccccaccccgtagccgtcgctgctcccggcatgccccgccccccacggagcctagtggtcttcaggaatggcgacccgaagacgaggcgtgcggttcttctgagcaggagggtcacccagagcttcgaggcatttctacagcacctgacagaggtcatgcagcgccctgtggtcaagctgtacgctacggacggaaggagggttcccagcctccaggcagtgatcctgagctctggagctgtggtggcggcaggaagggagccatttaaaccaggaaattatgacatccaaaaatacttgcttcctgctagattaccagggatctctcagcgtgtgtaccccaagggaaatgcaaagtcagaaagcagaaagataagcacacatatgtcttcaagctcaaggtcccagatttattctgtttcttctgagaaaacacataataatgattgctacttagactattcttttgttcctgaaaagtacttggccttagaaaagaatgattctcagaatttaccaatatatccttctgaagatgatattgagaaatcaattatttttaatcaagacggcactatgacagttgagatgaaagttcgattcagaataaaagaggaagaaaccataaaatggacaactactgtcagtaaaactggtccttctaataatgatgaaaagagtgagatgagttttccaggaagaacagaaagtcgatcatctggtttaaagcttgcagcatgttcattctctgcagatgtgtcacctatggagcgaagcagtaatcaagagggcagtttggcagaggagataaacattcaaatgacagatcaagtggctgaaacttgcagttctgctagttgggagaatgctactgtggacacagatatcatccagggaactcaagaccaagcaaagcatcgtttttataggccccctacacctggactaagaagagtgagacaaaagaaatctgtgattggcagtgtgaccttagtatctgaaactgaggttcaagagaaaatgattggacagttttcatatagtgaagaaagggaaagtggggaaaacaagtctgagtatcacatgtttacacattcttgcagtaaaatgtcatcagtatctaacaaaccagtacttgttcagatcaataacaatgatcaaatggaggagtcatcattagaaagaaaaaaggaaaacagtctgcttaagtcaagtgcaataagtgctggtgttatagaaattacaagtcagaagatgttagagatgtcacataataatggtttgccatcaactatatcaaataactcaattgtggaggaagatgtagttgattgtgtggtattggacaacaaaactggtatcaagaacttcaaaacttatggtaacaccaatgataggttcagtcctatttcagcagatgcaacccatttttcaagtaataactctggaactgacaaaaatatttctgaggctccagcttcagaagcatcctctactgtcactgcaagaattgacagactaattaatgaatttgctcagtgtggtttaacaaaacttccaaaaaatgaaaagaagattttgtcatctgttgccagcaaaaagaagaaaaaatctcgacagcaagcaataaattccaggtatcaagatggacagcttgcaaccaaaggaattcttaataagaatgagagaataaacacaaaaggtagaattacaaaggaaatgatagtgcaagattcagatagtccccttaaaggagggatactttgtgaggaagacctccagaaaagtgatactgtaattgaatcaaatactttttgttccaaaagtaatctcaattccacgatttccaagaatttccatagaaataaattaaatactactcaaaattccaaggttcaaggacttttaaccaaaagaaaatctagatcactaaataaaataagcttaggagcacctaaaaaaagagaaatcggtcaaagagataaagtgtttcctcacaatgaatctaaatattgcaaaagtacttttgaaaacaaaagtttatttcatgtatttaacatccttgagcaaaaacccaaagatttttatgcaccgcaatctcaagcagaagtggcatctgggtatttgagaggaatggcaaagaagagtttagtttcaaaagttactgattcacacataactttaaaaagccagaaaaaacgtaaaggggataaagtgaaagcaagtgctattttaagtaaacaacatgctacaaccagggcaaattctttagcttctttgaaaaaacctgattttcctgaggctattgctcatcattcaattcaaaattatatacagagttggttgcagaacataaatccatatccaactttaaagcctataaaatcagctccagtatgtagaaatgaaacgagtgtggtaaattgtagcaataatagtttttcagggaatgatccccatacaaattctggaaaaataagtaattttgttatggaaagtaataagcacataactaaaattgccggtttgacaggagataatctatgtaaagagggagataagtcttttattgccaatgacactggtgaagaagatctccatgagacacaggttggatctctgaatgatgcttatttggttcccctgcatgaacactgtactttgtcacagtcagctattaatgatcataatactaaaagtcatatagctgctgaaaaatcaggaccagagaaaaaacttgtttaccaggaaataaacctagctagaaaaaggcaaagtgtagaggctgccattcaagtagatcctatagaagaggaaactccaaaagacctcttaccagtcctgatgcttcaccaattgcaagcttcagttcctggtattcacaagactcagaatggagttgttcaaatgccaggttcacttgcaggtgttccctttcattctgcaatatgtaattcatccactaatctccttctagcttggctcttggtgctaaacctaaagggaagtatgaatagcttctgtcaagttgatgctcacaaggctaccaacaaatcttcagaaacacttgcattgttggagattctaaagcacatagctatcacagaggaagctgatgacttgaaagctgctgttgccaatttagtggagtcaactacaagccactttggactcagtgagaaagaacaagacatggttccaatagatctttctgcaaattgttccacggtcaacattcagagtgttcctaagtgcagtgaaaatgaaagaacacaaggaatctcctctttggatggaggttgctctgccagtgaggcatgtgcccctgaagtctgtgttttggaagtgacttgctctccatgtgagatgtgcactgtaaataaggcttattctccaaaagagacatgtaaccccagtgacactttttttcctagtgatggttatggtgtggatcagacttctatgaataaggcttgtttcctaggagaggtctgttcacttactgatactgtgttttctgataaggcttgtgctcaaaaggagaaccatacctatgagggagcttgcccaattgatgagacctacgttcctgtcaatgtctgcaataccattgactttttaaactccaaagaaaacacatatactgataacttggattcaactgaagagttagaaagaggtgatgacattcagaaagatctaaatattttgacagaccctgaatataaaaatggatttaatacattggtgtcacatcaaaatgtcagtaatttaagctcctgtggcctttgcctaagtgaaaaagaagcagaacttgataagaaacatagttctctagatgattttgaaaattgttcactaaggaagtttcaggatgaaaatgcatatacttcctttgatatggaagaaccacggacttctgaagaaccaggctcaataaccaacagcatgacatcaagtgaaagaaacatttcagaattggaatcttttgaagaattagaaaaccatgacactgatatctttaatacagtggtaaatggaggagagcaagccactgaagaattaatccaagaagaggtagaggctagtaaaactttagaattgatagacatctctagtaagaatattatggaagaaaaaagaatgaacggtataatttatgaaataatcagtaagaggctggcaacaccaccatctttagatttttgctatgattctaagcaaaatagtgaaaaggagaccaatgaaggagaaactaagatggtaaaaatgatggtgaaaactatggaaactggaagttattcagagtcctctcctgatttaaaaaaatgcatcaaaagtccagtgacttctgattggtcagactatcggcctgacagtgacagtgagcagccatataaaacatccagtgatgatcccaatgacagtggcgaacttacccaagagaaagaatataacataggatttgttaaaagggcaatagaaaaactgtacggtaaagcagatattatcaaaccatctttttttcctgggtctacccgcaaatctcaggtttgtccttataattctgtggaatttcagtgttccaggaaagcaagtctttatgattctgaagggcagtcatttggctcttctgaacaggtatctagtagttcatctatgttgcaggaattccaggaggaaagacaagataagtgtgatgttagtgctgtgagggacaattattgtaggggtgacattgtagaacctggtacaaaacaaaatgatgatagcagaatcctcacagacatagaggaaggagtactgattgacaaaggcaaatggcttctgaaagaaaatcatttgctaaggatgtcatctgaaaatcctggcatgtgtggcaatgcagacaccacatcagtggacaccctacttgataataacagcagtgaggtaccatattcacattttggtaatttggccccaggcccaacgatggatgaactctcctcttcagaactcgaggaactgactcaaccccttgaactaaaatgcaattactttaacatgcctcatggtagtgactcagaaccttttcatgaggacttgctggatgttcgcaatgaaacctgtgccaaggaaagaatagcaaatcatcatacagaggagaagggtagtcatcagtcagaaagagtatgcacatctgtcactcattcctttatttctgctggtaacaaagtctaccctgtctctgatgatgctattaaaaaccaaccattgcctggcagtaatatgattcatggtacacttcaggaagctgactctttggataaactgtatgctctttgtggtcaacattgcccaatactaactgttattatccaacccatgaatgaggaagaccgaggatttgcatatcgcaaagaatctgatattgaaaatttcttgggtttttatttatggatgaaaatacacccatatttacttcagacagacaaaaatgtgttcagggaagagaacaataaagcaagtatgagacaaaatcttattgataatgccattggtgatatatttgatcagttttatttcagtaacacatttgacttgatgggtaaaagaagaaaacaaaaaagaattaacttcttggggttagaggaagaaggtaatttaaagaaatttcaaccagatttgaaggaaaggttttgtatgaatttcttgcacacatcattgttagttgtgggtaatgtggattcaaatacacaagacctcagcggtcagacaaatgaaatctttaaagcagtcgatgagaataacaacttattaaataacagattccagggctcaagaacaaatctcaaccaagtagtaagagaaaatatcaactgtcattacttctttgaaatgcttggtcaagcttgcctcttagatatttgccaagttgagacctccttaaatattagcaacagaaatattttagaactttgtatgtttgagggtgaaaatcttttcatttgggaagaggaagacatattaaatttaactgatcttgaaagcagtagagaacaagaagatttataa

SEQ ID NO: 508 - DNA, 837 bp, Homo sapiens
  source 1..837: mol_type = genomic DNA
atggcagaggcgcgatcccagccctcggcggggccgcagctcaacgcgctaccggaccactctccgttgctgcagccgggcctggcggcgctgcggcgccgggcccgggaagctggcgtcccgctcgcgccgctgccgctcaccgactccttcctgctgcggttcctgcgcgcccgggatttcgatctggacctggcctggcggttactaaaaaactattataagtggagagcagaatgtccagaaataagtgcagatctacaccctagaagtattattggcctcctaaaggctggctaccatggagtcctgagatccagggatcccactggcagcaaagttcttatttacagaatcgcacactgggaccccaaagtttttacagcttatgacgtatttcgagtaagtctaatcacatccgagcttattgtacaggaggtagaaactcagcggaatggaatcaaggctatctttgatctggaaggttggcagttttctcatgcttttcaaatcactccatccgtagccaagaagattgctgctgtacttacggattcatttccattgaaagttcgtggcatccatttgataaatgaaccagtaattttccatgctgtcttttccatgatcaaaccattcctgactgaaaaaattaaggaacggattcacatgcatgggaacaactacaaacaaagcttgcttcagcatttcccagacattcttcctctggaatatggtggtgaagaattctccatggaggacatttgtcaggaatggacaaattttataatgaagtctgaagattatctcagcagcatttctgagagcattcaatga

SEQ ID NO: 509 - DNA, 3666 bp, Homo sapiens
  source 1..3666: mol_type = genomic DNA
atgctgttcccgctccaggtggccgctgtaacctcttcggtccgcgacgatcctctagagcactgtgtgtctccccggacgcgagcccgctcccctgaaatctgcaaaatggctgataatttggatgaatttattgaagagcaaaaagccagattggccgaagacaaagcagagttggaaagtgatccaccttacatggaaatgaagggaaagttgtcagcgaagctttctgaaaacagtaagatactgatctctatggctaaggaaaacataccaccaaatagtcaacagaccaggggttccttaggaattgattatggattaagtttaccacttggagaagactatgaacggaagaaacataaattaaaagaagaattgcggcaagattacagacgttatcttactcaggaaaggttgaaacttgaacgtaacaaagaatacaatcagtttctcaggggtaaggaagaatccagtgaaaagttcaggcaggtggaaaagagtactgagcccaagagtcagagaaataaaaaacctattggtcaagttaagcctgatctaacttcacaaatacagacatcttgtgaaaattcagagggtcctagaaaagatgtcttaactccttcagaggcatatgaagaacttctgaaccaaagacgactagaggaggacagataccgacaactagatgatgaaatcgaattaaggaatagaagaattattaaaaaagcaaatgaagaagtgggcatttccaacctaaaacatcaaaggtttgcaagcaaggctggcattccagatagaagatttcacagatttaatgaggatcgtgtttttgatagacggtatcatagaccagaccaagatcctgaagtaagtgaagaaatggatgagaggtttagatatgaaagtgattttgatagaagactttcgagagtgtatacaaatgacaggatgcacaggaacaaacgagggaatatgcctcctatggaacatgatggggatgttatagaacagtcaaacataagaatttcatctgctgaaaataaaagtgctccagacaatgaaacatccaaatctgctaatcaagatacctgtagtccttttgcagggatgctctttggaggtgaagatcgagaacttattcagagaaggaaagagaaatacagactagaactgttggaacaaatggctgagcaacagaggaacaagagacgagaaaaagatttagaactcagggttgcagcgtctggagcacaagaccctgagaaatcgcctgatagactaaagcagtttagtgtggcaccaagacactttgaagagatgataccacctgaaagacccagaatagctttccagacacctctccctcctttatctgccccatctgtcccacccatcccatcagttcatcctgttccttctcaaaatgaagatttgcgcagtggactcagcagcgcccttggtgaaatggtgtctcccaggattgcacctctgcctccacctcccctactaccacctttggctactaactatcgaactccttatgatgatgcatactatttttatgggtccaggaatactttcgatcccagtcttgcttattatggttcaggaatgatgggcgtacagcctgcagcttatgttagtgctcctgtcacccaccaactagcacaacctgttgtgaatacggttggacagaatgaactgaagattacaagtgatcaagtgataaattcaggattgatttttgaagataaaccgaaaccttccaaacagtcacttcagtcttaccaagaggctttgcagcagcagattcgggaaagagaagaaagaaggaagaaagaacgtgaagaaaaagaagaatatgaagctaaattagaagctgaaatgagaacatataatccctggggaaaaggtggaggtggtgctcctctcagggatgcaaaaggaaatctgataactgatttgaataggatgcacagacaaaatatagatgcctaccataacccagatgcaagaacatatgaagataaaagggctgttgtatctctagacccaaatttagccacttcaaatgctgagaacctagaagatgctgcaaataaaagctcaggtcatatgcaaacacagagctctccttttgctcggggaaatgtatttggtgagcctccaactgaacttcagattaaacagcaagaattatacaagaattttcttcgtttccagattgaggaaaagaaacaaagagaggaagcagagcgagagagactgagaattgcagaagaaaaagaagaaagacggcttgcagaacagagggcacgaattcagcaggagtatgaagaggaacaggaaaagaaaagagagaaagaggaggagcaaaggctaaaaaatgaagagcatattcggttagctgaagaaagacaaaaagaagcagaaagaaagaagaaagaagaagaagaaaaatataacctgcaacttcagcactactgtgaaagagacaatttgattggggaagaaacaaagcacatgagacagccttctcctatagttcctgctcttcagaacaaaattgcaagcaaactccaaagacctccttcagttgacagcatcatacgttcctttattcatgaaagttccatgtccagggcacagtcacccccggtacctgccaggaaaaatcagctccgtgcagaagaggagaaaaaaaatgtaattatggaattatcagaaatgagaaaacagcttcgtagtgaagagaggcgtctacaagagcgattgctacacatggacagtgatgatgaaattcctatcaggaaaaaggaaaggaatcccatggatatatttgatatggctagacatcggttgcaagctcctgtcagaagacagtcccctaagggcttagacgctgccacttttcagaatgttcatgattttaatgagctgaaagatagagattcagaaacacgagttgatctgaaatttatgtacctggatcctccaagagatcatcacaccttagagattcagcagcaagccctgctaagagagcagcagaagaggctgaacagaataaaaatgcaggaaggtgccaaagttgacttagatgccatcccaagtgctaaagtacgagagcaaagaatgcccagagatgacactagtgatttcttgaaaaactcattattggaatctgatagtgcttttattggggcttacggtgagacatatcctgccattgaagatgacgtcctccctccaccatcacagttgccctctgcacgggagcgcaggaggaacaaatggaaaggactagacattgatagcagtcgtcctaatgtagcaccagatggtctctctctaaaatctatatccagtgtaaatgttgatgagcttagagtgagaaatgaggaacgaatgcgaagactgaatgaatttcacaataaacctattaatacagatgatgagagttcactggttgaccctgatgacatcatgaaacacataggggatgacggatcaaactctgtagcaactgagccctggctccgccctggcacttcagaaacgctgaaacgtttcatggcagagcagctgaaccaggagcagcagcagattcctggaaaaccaggcactttcacttggcagggcctgtcgactgcacatggttaa

SEQ ID NO: 510 - DNA, 2883 bp, Homo sapiens
  source 1..2883: mol_type = genomic DNA
atgtggcgactacgtcgggccgctgtggcctgtgaggtctgccagtctttagtgaaacacagctctggaataaaaggaagtttaccactacaaaaactacatctggtttcacgaagcatttatcattcacatcatcctaccttaaagcttcaacgaccccaattaaggacatcctttcagcagttctcttctctgacaaaccttcctttacgtaaactgaaattctctccaattaaatatggctaccagcctcgcaggaatttttggccagcaagattagctacgagactcttaaaacttcgctatctcatactaggatcggctgttgggggtggctacacagccaaaaagacttttgatcagtggaaagatatgataccggaccttagtgaatataaatggattgtgcctgacattgtgtgggaaattgatgagtatatcgattttgagaaaattagaaaagcccttcctagttcagaagaccttgtaaagttagcaccagactttgacaagattgttgaaagccttagcttattgaaggacttttttacctcaggttctccggaagaaacggcgtttagagcaacagatcgtggatctgaaagtgacaagcattttagaaaggtgtcagacaaagagaaaattgaccaacttcaggaagaacttctgcacactcagttgaagtatcagagaatcttggaacgattagaaaaggagaacaaagaattgagaaaattagtattgcagaaagatgacaaaggcattcatcatagaaagcttaagaaatctttgattgacatgtattctgaagttcttgatgttctctctgattatgatgccagttataatacgcaagatcatctgccacgggttgttgtggttggagatcagagtgctggaaagactagtgtgttggaaatgattgcccaagctcgaatattcccaagaggatctggggagatgatgacacgttctccagttaaggtgactctgagtgaaggtcctcaccatgtggccctatttaaagatagttctcgggagtttgatcttaccaaagaagaagatcttgcagcattaagacatgaaatagaacttcgaatgaggaaaaatgtgaaagaaggctgtaccgttagccctgagaccatatccttaaatgtaaaaggccctggactacagaggatggtgcttgttgacttaccaggtgtgattaatactgtgacatcaggcatggctcctgacacaaaggaaactattttcagtatcagcaaagcttacatgcagaatcctaatgccatcatactgtgtattcaagatggatctgtggatgctgaacgcagtattgttacagacttggtcagtcaaatggaccctcatggaaggagaaccatattcgttttgaccaaagtagacctggcagagaaaaatgtagccagtccaagcaggattcagcagataattgaaggaaagctcttcccaatgaaagctttaggttattttgctgttgtaacaggaaaagggaacagctctgaaagcattgaagctataagagaatatgaagaagagttttttcagaattcaaagctcctaaagacaagcatgctaaaggcacaccaagtgactacaagaaatttaagccttgcagtatcagactgcttttggaaaatggtacgagagtctgttgaacaacaggctgatagtttcaaagcaacacgttttaaccttgaaactgaatggaagaataactatcctcgcctgcgggaacttgaccggaatgaactatttgaaaaagctaaaaatgaaatccttgatgaagttatcagtctgagccaggttacaccaaaacattgggaggaaatccttcaacaatctttgtgggaaagagtatcaactcatgtgattgaaaacatctaccttccagctgcgcagaccatgaattcaggaacttttaacaccacagtggatatcaagcttaaacagtggactgataaacaacttcctaataaagcagtagaggttgcttgggagaccctacaagaagaattttcccgctttatgacagaaccgaaagggaaagagcatgatgacatatttgataaacttaaagaggctgttaaggaagaaagtattaaacgacacaagtggaatgactttgcggaggacagcttgagggttattcaacacaatgctttggaagaccgatccatatctgataaacagcaatgggatgcagctatttattttatggaagaggctctgcaggctcgtctcaaggatactgaaaatgcaattgaaaacatggtgggtccagactggaaaaagaggtggttatactggaagaatcggacccaagaacagtgtgttcacaatgaaaccaagaatgaattggagaagatgttgaaatgtaatgaggagcacccagcttatcttgcaagtgatgaaataaccacagtccggaagaaccttgaatcccgaggagtagaagtagatccaagcttgattaaggatacttggcatcaagtttatagaagacattttttaaaaacagctctaaaccattgtaacctttgtcgaagaggtttttattactaccaaaggcattttgtagattctgagttggaatgcaatgatgtggtcttgttttggcgtatacagcgcatgcttgctatcaccgcaaatactttaaggcaacaacttacaaatactgaagttaggcgattagagaaaaatgttaaagaggtattggaagattttgctgaagatggtgagaagaagattaaattgcttactggtaaacgcgttcaactggcggaagacctcaagaaagttagagaaattcaagaaaaacttgatgctttcattgaagctcttcatcaggagaaataa

SEQ ID NO: 511 - DNA, 918 bp, Homo sapiens
  source 1..918: mol_type = genomic DNA
atggcttccagaaaagagaatgcgaagagtgcaaacagagtgctaagaataagccagttggatgcacttgaactaaacaaggccctggagcagctagtttggtcccagtttactcagtgctttcatggatttaaacctgggctgttagctcgctttgagccagaggtgaaagcgtgcttatgggttttcttgtggagattcaccatctactccaaaaatgccacagtgggacagtcagttttgaatattaagtacaaaaatgatttttcccctaacctgagatatcagccacccagtaaaaatcaaaaaatctggtatgctgtttgtacaattggtggcaggtggttagaagaacgatgctatgatttgtttcgaaaccatcatttagcatcatttgggaaagtcaagcagtgtgtgaattttgtgattggacttttgaaattaggtgggctgattaattttttgattttccttcagaggggaaagtttgcaactttgacagaacgtctcctaggtattcattctgtattttgcaagcctcaaaacatatgtgaagttggctttgaatacatgaatagggaacttctctggcatggttttgctgaatttctgatttttctcttaccacttatcaatgtccagaagttgaaagccaagctgtcttcatggtgtattcctcttactggtgcacctaatagtgacaatacattagccaccagtggcaaagaatgcgctctatgtggagagtggcccaccatgcctcacaccataggatgtgagcatattttctgttatttctgtgctaagagtagtttcttatttgacgtgtactttacttgtcctaagtgtggcacagaagtacacagtctgcagccactgaaatcaggaatcgagatgtcagaagtaaatgctctttag

SEQ ID NO: 512 - DNA, 2430 bp, Homo sapiens
  source 1..2430: mol_type = genomic DNA
atgtttaaatcgctgacaaaagtcaacaaggtgaagcctataggagagaacaatgagaatgaacaaagttctcgtcggaatgaagaaggctctcacccaagtaatcagtctcagcaaaccacagcacaggaagaaaacaaaggtgaagagaaatctctcaaaaccaagtcaactccagtcacgtctgaagagccacacaccaacatacaagacaaactctccaagaaaaattcctctggagatctgaccacaaaccctgaccctcaaaatgcagcagaaccaactggaacagtgccagagcagaaggaaatggaccccgggaaagaaggtccaaacagcccacaaaacaaaccgcctgcagctcctgttataaatgagtatgccgatgcccagctacacaacctggtgaaaagaatgcgtcaaagaacagccctctacaagaaaaagttggtagagggagatctctcctcacccgaagccagcccacaaactgcaaagcccacggctgtaccaccagtaaaagaaagcgatgataagccaacagaacattactacaggctgttgtggttcaaagtcaaaaagatgcctttaacagagtacttaaagcgaattaaacttccaaacagcatagattcatacacagatcgactctatctcctgtggctcttgcttgtcactcttgcctataactggaactgctgttttataccactgcgcctcgtcttcccatatcaaaccgcagacaacatacactactggcttattgcggacatcatatgtgatatcatctacctttatgatatgctatttatccagcccagactccagtttgtaagaggaggagacataatagtggattcaaatgagctaaggaaacactacaggacttctacaaaatttcagttggatgtcgcatcaataataccatttgatatttgctacctcttctttgggtttaatccaatgtttagagcaaataggatgttaaagtacacttcattttttgaatttaatcatcacctagagtctataatggacaaagcatatatctacagagttattcgaacaactggatacttgctgtttattctgcacattaatgcctgtgtttattactgggcttcaaactatgaaggaattggcactactagatgggtgtatgatggggaaggaaacgagtatctgagatgttattattgggcagttcgaactttaattaccattggtggccttccagaaccacaaactttatttgaaattgtttttcaactcttgaattttttttctggagtttttgtgttctccagtttaattggtcagatgagagatgtgattggagcagctacagccaatcagaactacttccgcgcctgcatggatgacaccattgcctacatgaacaattactccattcctaaacttgtgcaaaagcgagttcggacttggtatgaatatacatgggactctcaaagaatgctagatgagtctgatttgcttaagaccctaccaactacggtccagttagccctcgccattgatgtgaacttcagcatcatcagcaaagtcgacttgttcaagggttgtgatacacagatgatttatgacatgttgctaagattgaaatccgttctctatttgcctggtgactttgtctgcaaaaagggagaaattggcaaggaaatgtatatcatcaagcatggagaagtccaagttcttggaggccctgatggtactaaagttctggttactctgaaagctgggtcggtgtttggagaaatcagccttctagcagcaggaggaggaaaccgtcgaactgccaatgtggtggcccacgggtttgccaatcttttaactctagacaaaaagaccctccaagaaattctagtgcattatccagattctgaaaggatcctcatgaagaaagccagagtgcttttaaagcagaaggctaagaccgcagaagcaacccctccaagaaaagatcttgccctcctcttcccaccgaaagaagagacacccaaactgtttaaaactctcctaggaggcacaggaaaagcaagtcttgcaagactactcaaattgaagcgagagcaagcagctcagaagaaagaaaattctgaaggaggagaggaagaaggaaaagaaaatgaagataaacaaaaagaaaatgaagataaacaaaaagaaaatgaagataaaggaaaagaaaatgaagataaagataaaggaagagagccagaagagaagccactggacagacctgaatgtacagcaagtcctattgcagtggaggaagaaccccactcagttagaaggacagttttacccagagggacttctcgtcaatcactcattatcagcatggctccttctgctgagggcggagaagaggttcttactattgaagtcaaagaaaaggctaagcaataa

SEQ ID NO: 513 - DNA, 624 bp, Homo sapiens
  source 1..624: mol_type = genomic DNA
atggcggaggacctggacgagctcttggatgaagtcgagtccaagttttgcacacctgaccttctaagacggggtatggtcgagcagcccaaaggctgcggcggcggcacccacagtagcgaccggaaccaagccaaggcgaaagagacgctcagatcaacagaaacatttaaaaaagaagatgatcttgacagtcttattaatgaaatacttgaagagcccaacttggacaaaaaaccctctaaattaaaatctaaatcttcaggtaacacatctgtcagagcttccattgaaggccttggtaaaagttgcagtccggtgtaccttggtggaagctctattccatgtgggattggaacaaatatttcatggagagcatgtgaccatctgcgttgtatagcctgtgatttcttggtagtcagctatgatgactatatgtgggacaaatcgtgtgattatctgtttttcaggaacaacatgccagaatttcacaaattaaaagcaaagttgataaagaagaaaggaacacgggcatatgcctgccagtgtagctggagaactattgaagaagtgactgaccttcagacagatcatcagcttcgctgggtttgtggtaaacattaa

SEQ ID NO: 514 - DNA, 1368 bp, Homo sapiens
  source 1..1368: mol_type = genomic DNA
atggatactcccagggtcctgctctcggccgtcttcctcatcagttttctgtgggatttgcccggtttccagcaggcttccatctcatcctcctcgtcgtccgccgagctgggttccaccaagggcatgcgaagccgcaaggaaggcaagatgcagcgggcgccgcgcgacagtgacgcgggccgggagggccaggaaccacagccgcggcctcaggacgaaccccgggctcagcagccccgggcgcaggagccgccaggcaggggtccgcgcgtggtgccccacgagtacatgctgtcaatctacaggacttactccatcgctgagaagctgggcatcaatgccagctttttccagtcttccaagtcggctaatacgatcaccagctttgtagacaggggactagacgatctctcgcacactcctctccggagacagaagtatttgtttgatgtgtccatgctctcagacaaagaagagctggtgggcgcggagctgcggctctttcgccaggcgccctcagcgccctgggggccaccagccgggccgctccacgtgcagctcttcccttgcctttcgcccctactgctggacgcgcggaccctggacccgcagggggcgccgccggccggctgggaagtcttcgacgtgtggcagggcctgcgccaccagccctggaagcagctgtgcttggagctgcgggccgcatggggcgagctggacgccggggaggccgaggcgcgcgcgcggggaccccagcaaccgccgcccccggacctgcggagtctgggcttcggccggagggtgcggcctccccaggagcgggccctgctggtggtattcaccagatcccagcgcaagaacctgttcgcagagatgcgcgagcagctgggctcggccgaggctgcgggcccgggcgcgggcgccgaggggtcgtggccgccgccgtcgggcgccccggatgccaggccttggctgccctcgcccggccgccggcggcggcgcacggccttcgccagtcgccatggcaagcggcacggcaagaagtccaggctacgctgcagcaagaagcccctgcacgtgaacttcaaggagctgggctgggacgactggattatcgcgcccctggagtacgaggcctatcactgcgagggtgtatgcgacttcccgctgcgctcgcacctggagcccaccaaccacgccatcatccagacgctgatgaactccatggaccccggctccaccccgcccagctgctgcgtgcccaccaaattgactcccatcagcattctatacatcgacgcgggcaataatgtggtctacaagcagtacgaggacatggtggtggagtcgtgcggctgcaggtag

SEQ ID NO: 515 - DNA, 4050 bp, Homo sapiens
  source 1..4050: mol_type = genomic DNA
atgtcggctcctgtcgggccccggggccgcctggctcccatcccggcggcctctcagccgcctctgcagcccgagatgcctgacctcagccacctcacggaggaggagaggaaaatcatcctggccgtcatggataggcagaagaaagaagaggagaaggagcagtccgtgctcaaaaaactgcatcagcagtttgaaatgtataaagagcaggtaaagaagatgggagaagaatcacagcaacagcaagaacagaagggtgatgcgccaacctgtggtatctgccacaaaacaaagtttgctgatggatgtggccataactgttcatattgccaaacaaagttctgtgctcgttgtggaggtcgagtgtcattacgctcaaacaaggttatgtgggtatgtaatttgtgccgaaaacaacaagaaatcctcactaaatcaggagcatggttttataatagtggatctaatacaccacagcaacctgatcaaaaggttcttcgagggctaagaaatgaggaggcacctcaggagaagaaaccaaaactacatgagcagacccagttccaaggaccctcaggtgacttatctgtacctgcagtggagaaaagtcgatctcatgggctcacaagacagcattctattaaaaatgggtcaggcgtgaagcatcacattgccagtgacatagcttcagacaggaaaagaagcccatctgtgtccagagatcagaatagaagatacgaccaaagggaagaaagagaggaatattcacagtatgctacttcggataccgcaatgcctagatctccatcagattatgctgataggcgatctcaacatgaacctcagttttatgaagactctgatcatttaagttatagggactccaacaggagaagtcataggcattccaaagaatatattgtagatgatgaggatgtggaaagcagagatgaatacgaaaggcaaaggagagaggaagagtaccagtcacgctaccgaagtgatccgaatttggcccgttatccagtaaagccacaaccctatgaagaacaaatgcggatccatgctgaagtgtcccgagcacggcatgagagaaggcatagtgatgtttctttggcaaatgctgatctggaagattccaggatttctatgctaaggatggatcgaccatcaaggcaaagatctatatcagaacgtagagctgccatggaaaatcagcgatcttattcaatggaaagaactcgagaggctcagggaccaagttcttatgcacaaaggaccacaaaccatagtcctcctacccccaggaggagtccactacccatagatagaccagacttgaggcgtactgactcactacggaaacagcaccacttagatcctagctctgctgtaagaaaaacaaaacgggaaaaaatggaaacaatgttaaggaatgattctctcagttcagaccagtcagagtcagtgagacctccaccaccaaagcctcataaatcaaagaaaggcggtaaaatgcgccagatttcgttgagcagttcagaggaggaattggcttccacgcctgaatatacaagttgtgatgatgttgagattgaaagtgagagtgtaagtgaaaaaggagacatggattacaactggttggatcatacgtcttggcatagcagtgaggcatccccaatgtctttgcaccctgtaacctggcaaccatctaaagatggagatcgtttaattggtcgcattttattaaataagcgtctaaaagatggaagtgtacctcgagattcaggagcaatgcttggcttgaaggttgtaggaggaaagatgactgaatcaggtcggctttgtgcatttattactaaagtaaaaaaaggaagtttagctgatactgtaggacatcttagaccaggtgatgaagtattagaatggaatggaagactactgcaaggagccacatttgaggaagtgtacaacatcattctagaatccaaacctgaaccacaagtagaacttgtagtttcaaggcctattggagatataccgcgaatacctgatagcacacatgcacaactggagtccagttctagctcctttgaatctcaaaaaatggatcgtccttctatttctgttacctctcccatgagtcctggaatgttgagggatgtcccacagttcttatcaggacaactttcaagccaaagccttagtagaagaacaacgccttttgttcctagggttcagataaaactatggtttgacaaggttggtcaccaattaatagttacaattttgggagcaaaagatctcccttccagggaagatgggaggccaaggaatccttatgttaaaatttactttcttccagacagaagtgataaaaacaagagaagaactaaaacagtaaagaaaacattggaacccaaatggaaccaaacattcatttattctccagtccaccgaagagaatttcgggaacgaatgctagagattaccctttgggatcaagctcgtgttcgagaggaagaaagtgaattcttaggcgagattttaattgaattagaaacagcattattagatgatgagccacattggtacaaacttcagacgcatgatgtctcttcattgccacttccccacccttctccatatatgccacgaagacagctccatggagagagcccaacacggaggttgcaaaggtcaaagagaataagtgatagtgaagtctctgactatgactgtgatgatggaattggtgtagtatcagattatcgacatgatggtcgagatcttcaaagctcaacattatcagtgccagaacaagtaatgtcatcaaaccactgttcaccatcagggtctcctcatcgagtagatgttataggaaggactagatcatggtcacccagtgtccctcctccacaaagtcggaatgtggaacaggggcttcgagggacccgcactatgaccggacattataatacaattagccgaatggacagacatcgtgtcatggatgaccattattctccagatagagacagggattgtgaagcagcagatagacagccatatcacagatccagatcaacagaacaacggcctctccttgagcggaccaccacccgctccagatccactgaacgtcctgatacaaacctcatgaggtcgatgccttcattaatgactggaagatctgcccctccttcacctgccttatcgaggtctcatcctcgtactgggtctgtccagacaagcccatcaagtactccagtcgcaggacgaaggggccgacagcttccacagcttccaccaaagggaacgttggatagaaaagcaggaggtaaaaaactaaggagcactgtccaaagaagtacagaaacaggcctggccgtggaaatgaggaactggatgactcgacaggcaagccgagagtctacagatggtagcatgaacagctacagctcagaaggaaatctgattttccctggtgttcgcttggcctctgatagccagttcagtgatttcctggatggccttggccctgctcagctagtgggacgccagactctggcaacacctgcaatgggtgacattcaggtaggaatgatggacaaaaagggacagctggaggtagaaatcatccgggcccgtggccttgttgtaaaaccaggttccaagacactgccagcaccgtatgtaaaagtgtatctattagataacggagtctgcatagccaaaaagaaaacaaaagtggcaagaaaaacgctggaacccctttaccagcagctattatctttcgaagagagtccacaaggaaaagttttacagatcatcgtctggggagattatggccgcatggatcacaaatcttttatgggagtggcccagatacttttagatgaactagagctatccaatatggtgatcggatggttcaaacttttcccaccttcctccctagtagatccaaccttggcccctctgacaagaagagcttcccaatcatctctggaaagttcaactggaccttcttactctcgttcatag

SEQ ID NO: 516 - DNA, 1638 bp, Homo sapiens
  source 1..1638: mol_type = genomic DNA
atgctcaaacagagtgagaggagacggtcctggagctacaggccctggaacacgacggagaatgagggcagccaacaccgcaggagcatttgctccctgggtgcccgttccggctcccaggccagcatccacggctggacagagggcaactataactactacatcgaggaagacgaagacggcgaggaggaggaccagtggaaggacgacctggcagaagaggaccagcaggcaggggaggtcaccaccgccaagcccgagggccccagcgaccctccggccctgctgtccacgctgaatgtgaacgtgggtggccacagctaccagctggactactgcgagctggccggcttccccaagacgcgcctaggtcgcctggccacctccaccagccgcagccgccagctaagcctgtgcgacgactacgaggagcagacagacgaatacttcttcgaccgcgacccggccgtcttccagctggtctacaatttctacctgtccggggtgctgctggtgctcgacgggctgtgtccgcgccgcttcctggaggagctgggctactggggcgtgcggctcaagtacacgccacgctgctgccgcatctgcttcgaggagcggcgcgacgagctgagcgaacggctcaagatccagcacgagctgcgcgcgcaggcgcaggtcgaggaggcggaggaactcttccgcgacatgcgcttctacggcccgcagcggcgccgcctctggaacctcatggagaagccattctcctcggtggccgccaaggccatcggggtggcctccagcaccttcgtgctcgtctccgtggtggcgctggcgctcaacaccgtggaggagatgcagcagcactcggggcagggcgagggcggcccagacctgcggcccatcctggagcacgtggagatgctgtgcatgggcttcttcacgctcgagtacctgctgcgcctagcctccacgcccgacctgaggcgcttcgcgcgcagcgccctcaacctggtggacctggtggccatcctgccgctctaccttcagctgctgctcgagtgcttcacgggcgagggccaccaacgcggccagacggtgggcagcgtgggtaaggtgggtcaggtgttgcgcgtcatgcgcctcatgcgcatcttccgcatcctcaagctggcgcgccactccaccggactgcgtgccttcggcttcacgctgcgccagtgctaccagcaggtgggctgcctgctgctcttcatcgccatgggcatcttcactttctctgcggctgtctactctgtggagcacgatgtgcccagcaccaacttcactaccatcccccactcctggtggtgggccgcggtgagcatctccaccgtgggctacggagacatgtacccagagacccacctgggcaggttttttgccttcctctgcattgcttttgggatcattctcaacgggatgcccatttccatcctctacaacaagttttctgattactacagcaagctgaaggcttatgagtataccaccatacgcagggagaggggagaggtgaacttcatgcagagagccagaaagaagatagctgagtgtttgcttggaagcaacccacagctcaccccaagacaagagaattag

SEQ ID NO: 517 - DNA, 3138 bp, Homo sapiens
  source 1..3138: mol_type = genomic DNA
atggggtcgcagccgccgctggggtctccgctgtctcgcgaggagggtgaagcgcccccgcctgctcccgcttcggagggtaggcggagaagtcgccgggtacgccttcgcggatcctgccgacaccgacctagctttctgggctgccgggagctcgcggcgagcgccccagccaggcctgcgccggcatcctccgagataatggcatcagctgctaaggaatttaaaatggacaacttttcacctaaagctggcactagcaaattgcaacagacagtaccagctgatgcatctcctgattctaagtgtcctatatgcttggatagatttgataatgtgtcttacttagatcgctgcttacataagttctgttttcgctgtgtacaggagtggtcaaaaaacaaagctgaatgcccactatgtaaacagccctttgattctattttccattctgtgagggcagaagatgacttcaaggagtatgtcctaaggccttcgtataatggttcttttgtcacccctgatcgacgatttcgctaccgtacaactctgacaagggaacgaaatgcttctgtgtattcacctagtggtcctgtgaacagaagaacaacaactccaccggatagtggagtactgtttgaagggttaggcatttcaacaagacctagagatgttgaaattcctcagtttatgagacagattgcagtaaggaggccaactacggcagatgaaagatctttgcggaaaattcaagaacaagatattattaattttagacgaactctttatcgtgctggtgctcgagttagaaatattgaagatggtggccgctacagggatatttcagctgaatttttccgtagaaatccagcttgccttcacagattagtcccctggttaaaacgtgaacttacagttctttttggagctcatggatctttagtgaatattgtccagcatattatcatgagtaatgttactcgctatgacttggagagtcaggcatttgtgtctgatttaagaccatttttacttaatcgaactgagcattttatacatgaatttatcagttttgcccgatctccttttaacatggcagcctttgaccagcatgccaattatgattgccctgctccttcatacgaagaaggcagccattctgattcttcagtcataacaatatctccagatgaggctgagacccaagagctggatattaatgtagccactgttagtcaggcaccatgggatgatgaaactccaggaccatcttactcaagctcagagcaggtacacgttactatgtcttctcttttaaatacttctgacagttcagatgaagaacttgtcacaggaggagccacgtctcagatacaaggagtacaaaccaatgacgacctaaataatgacagtgatgattcttcagataattgtgtcattgttgggtttgttaaaccactagctgagaggaccccagaacttgttgaactgtcctctgattctgaggacttaggttcttatgagaaaatggagacagtgaagacacaagaacaggagcaatcttacagttctggtgatagcgatgttagtagatgctcatctccacactctgtccttggaaaggatgaacaaataaataaaggtcattgtgattctagtacaagaatcaaatcaaagaaggaagagaaacgatctacatcattgtcatctcccagaaacctgaactcatctgtaagaggagacagagtatattctccatataaccatagacacagaaagaggggaagatcaagaagttcagattcacgttctcagagtagaagtgggcatgatcagaagaatcatagaaagcatcatgggaagaaaagaatgaaaagtaaacgatccagaagcagggaaagtagcagacctagagggagaagagacaaaaagagatcaagaactagagatagcagttggtccagaagaagccaaactctgtctctaagtagtgaaagcacaagcagatcaaggtctcgtagcagtgatcatggtaaaagaagatcacggagcagaaatagagatcgttattatttaagaaataattatggaagcagatacaaatgggagtatacttattacagtagaaacaaggacagggatgggtacgaatcatcttacaggaggaggactctgtccagagctcattattctagacagtcttcaagtccagaatttagagttcagtccttttctgaaagaacaaatgctaggaaaaaaaataatcacagtgagaggaagtattactactatgaaaggcacagatcaaggagcctgtctagtaacagatcaaggactgcatctaccgggactgaccgggtgagaaatgaaaagcctggagggaaacgaaaatacaaaacacggcatttggagggtactaacgaagtggctcagccatctcgtgaatttgcttctaaagcaaaggacagtcattaccaaaaatcttcatcaaaattggatggaaactacaaaaatgagagtgataccttttcagacagccgatcatcagacagagagacaaaacacaaaaggagaaaaaggaagacccggagcctaagtgtagagatagtttatgaaggaaaagctactgatacaactaaacaccataaaaagaaaaagaagaaacataagaagaagcataagaaacaccatggagataatgcttcacgttccccagttgtaattaccattgacagtgacagtgataaggattctgaagtaaaggaggatacagaatgtgacaatagtggtcctcaagaccctctacaaaatgagtttttggctccttccttggaaccatttgaaactaaagatgtagttacaatagaagctgaatttggtgtgctggacaaggaatgtgatattgccacacttagtaacaacttgaataatgccaacaaaactgtagataatattccacctctggcagcttcagttgaacaaactctcgatgtaagagaagagagcacctttgtttctgatttggagaaccagcccagtaacattgtgtctcttcaaactgagccatcaaggcaattgccatcgccacggacatcattaatgtcagtatgtcttggtagagactgtgatatgtcttaa

SEQ ID NO: 518 - DNA, 2070 bp, Homo sapiens
  source 1..2070: mol_type = genomic DNA
atgatcgactccgtgaagctgcgccgcgacagcgcggcggacttcttctcccactacgagtacctgtgcgcgctgcagaactcggtgccgctgcccgccgtgcgcgcctgtctccgggagggcgtgctggatttcaacgccgaccgcctccgcggggtggactgggcgcctctgctgagcaccctcaagatcaataaagacctgcccttggtctccatcaagagcttcttccagccctggctgggggacacaggttctgacatgaataaattttgcagaagtcgtgttcctgcgataagatacaaagatgtgaccttccagttgtgtaaagctcttaaaggctgtttaagtatatcaagtgtgctaaagaacctggagctaaatggactaattctgagagagagggatttaactattctagcaaagggattgaataaatcggcttctttggtgcacctgtctcttgcaaattgtccaattggagatggaggtttagaaattatttgtcaaggtataaagagctctatcactcttaagacagtcaacttcacaggatgtaatctgacatggcagggagcagatcacatggccaagatcttaaagtatcagaccatgagaaggcatgaagaaacctgggctgagagtcttcgctataggagacctgatcttgactgtatggctggcttaagacgtatcacactgaattgcaacacacttattggtgacctaggtgcatgtgcttttgcagactctctcagtgaggatttatggctgagagctcttgacctgcaacagtgcggcctcaccaatgaaggagcaaaggctttgctagaggcccttgaaaccaatacaactctggtcgttctggatataagaaaaaatccactcattgatcattctatgatgaaagcagttatcaaaaaagtcctccagaatggaaggagtgccaaatcagagtaccagtggataacttctccatcagtgaaggaaccatccaaaactgctaaacagaaaaggagaactataattctaggaagtggtcacaaaggaaaagctactattagaattggattggctacaaagaaacctgtaagtagtggcagaaaacactcccttggtaaagaatattatgcgcccgcacctcttccacctggtgtgtctggtttcttgccgtggcgtactgcagaacgtgcaaaaagacacaggggtttcccattaatcaaaacacgtgatatatgtaatcagttgcagcaaccaggttttcctgtgactgtgacagtagagagtccttcatcctctgaagttgaagaggttgatgattcttcagagagtgttcatgaagtgcctgagaaaactagtatagaacaagaagcattacaggaaaaactggaggagtgcctaaagcagttaaaggaagaaagagtgataaggcttaaggttgataaacgagtcagtgagctggaacatgaaaatgcccagttaagaaatataaatttctctttgtctgaagcccttcatgcacagtcattgacaaatatgatcctggatgatgaaggtgttttgggcagcattgagaattcttttcagaagtttcatgctttcttggatctccttaaagatgctgggcttgggcagcttgccacaatggctgggatagatcagtcagattttcaattactaggtcatccccagatgacttctactgttagtaatccacctaaagaagaaaagaaggcgcttgaagatgaaaaaccagaaccgaagcagaatgccctagggcaaatgcaaaatatccagtttcagaaaattacaggtgatgctagaattcctttgcctctcgactcctttcctgtcccagtttctactccagagggcttaggaacttccagcaacaacctaggagtcccagctactgagcagcggcaggagtcttttgaaggattcattgctagaatgtgttctccttcaccagatgcgacttctggaactggaagtcaaagaaaagaagaggagttgtccagaaatagcagatcttcttcagagaaaaagaccaaaacagaatcccattga

SEQ ID NO: 519 - DNA, 3198 bp, Homo sapiens
  source 1..3198: mol_type = genomic DNA
atgaacaagtcagagaacctgctgtttgctggttcatcattagcatcacaagtccatgctgctgccgttaatggagataagggtgctctacagaggctcatcgtaggaaactctgctcttaaagacaaagaagatcagtttgggagaacaccacttatgtattgcgtgttggctgacagattggattgtgcagatgctcttctgaaggcaggagcagatgtgaataaaactgaccatagccagagaacagccctccatcttgcagcccagaagggaaattatcgtttcatgaaactcttacttacacgcagagcaaactggatgcaaaaggatctggaagagatgactcctttgcacttgaccacccggcacaggagccctaagtgtttggcacttctgctgaagtttatggcaccaggagaagtggatacacaggataaaaacaagcaaacagctctgcattggagtgcctactacaataaccctgagcatgtgaagctgctcatcaagcatgattctaacattgggattcctgatgttgaaggcaagatcccacttcactgggcagccaaccataaagatccaagtgctgttcacacagtgagatgcattctggatgctgctccaacagagtctttactgaactggcaagactacgagggtcgaactcctcttcactttgcagttgctgatgggaatgtgaccgtggttgatgtcttgacctcatatgaaagctgcaatataacgtcttatgataacttatttcgaaccccactgcactgggcagctttattaggccatgcacagattgtccatctccttttagaaagaaataagtctggaactatcccatctgacagccaaggagccacacctttgcactatgctgctcagagtaactttgctgaaacggttaaagtgtttttaaaacatccttcagtgaaagatgattcagacctggaaggaagaacatcctttatgtgggcagctggcaaaggcagtgatgatgtccttagaactatgctgagcttaaaatcggacatagatattaacatggctgacaaatatggaggtacagctttgcatgctgctgctctttctggccatgtcagcaccgtgaagttattactggaaaataatgctcaagtagatgctactgatgttatgaaacatactccacttttccgagcctgtgagatgggacacaaagatgtgattcagacactcattaaaggtggagcaagggtagatctagttgaccaagatggacattctcttctacattgggcagcactgggaggaaatgctgatgtttgccagatattaatagaaaataagatcaatccaaatgtccaggattatgcaggaagaacccctttgcagtgtgcagcatatggaggctatatcaactgcatggcagttctcatggaaaacaatgcagaccctaacattcaagacaaagagggaagaacagctttgcattggtcctgcaacaatggataccttgatgccattaaattactgctagactttgctgctttccctaatcagatggaaaacaatgaagagagatacacaccccttgattatgctttgcttggtgagcgccatgaagtgatccagttcatgttggagcacggtgccctgtccatcgcagccatacaagacatcgccgccttcaaaatccaagctgtctacaaagggtacaaggtcagaaaagccttccgagacaggaaaaatctcctcatgaagcatgaacagttgagaaaagatgctgctgccaaaaagcgagaggaagaaaacaaacgaaaagaggcagaacagcaaaaaggaaggcggagcccagattcctgcagaccccaggcccttccctgtctgcctagcacccaggatgtgcccagcaggcagagccgggcccccagcaagcagcctcctgctggcaacgtggcccaaggccctgagccaagagacagcagaggatctccaggagggtctctaggcggagccctccagaaggagcagcatgtttcctcagatttgcagggaacaaactccagaaggccaaatgaaacagccagagaacattctaaaggccaatctgcttgtgtccacttcagacccaatgaaggcagtgatggaagcaggcatccaggagttccctctgttgagaagtccagaggtgagacagctggcgatgagcggtgtgcaaaggggaaaggcttcgtgaagcagccctcctgtatcagggtggctgggcctgatgagaaaggagaggactccaggcgggcagctgcaagccttccaccgcacgatagccactggaagcccagcaggcggcatgacacagaacccaaggccaaatgtgccccccagaaaaggcgcactcaagagctcagaggaggaaggtgctctccggctggttctagccgccctggcagtgcccggggggaggcggtccatgctgggcagaatcctccccaccatcgtacaccaagaaacaaagtgacacaagccaagctcacaggagggctctattcacatttgccacagagcacagaggagttgaggtcaggagctaggaggctggagacatctaccctgtccgaggactttcaggtatctaaggagactgatccagcacctggtcccctctctgggcagagtgtgaatattgaccttctccccgtagagctccgactgcagataattcagagagaacgaaggaggaaggagctgtttcgcaaaaagaacaaggcagcagcagtcatccagcgcgcctggcgaagctaccagctcaggaagcacctgtcccaccttcggcatatgaagcagcttggagctggagatgtggacagatggaggcaagagtctacagcattgctcctccaggtttggaggaaggaactggaactaaaattcccccaaaccactgcagtaagcaaggcccccaagagtccatccaagggcacctcaggcacaaagtccaccaagcactcagtgcttaagcaaatctatggttgttctcacgaagggaaaatacatcatcctacaagatctgtaaaagcctcttctgtgctgcgtctcaactcagtgagcaacctacagtgtatacatctccttgagaacagtggaagatcaaagaacttttcttataacctgcaatcagctactcagccaaaaaacaaaacaaaaccttga

SEQ ID NO: 520 - DNA, 1569 bp, Homo sapiens
  source 1..1569: mol_type = genomic DNA
atggcttcctcgcgagcctcttccacgcaggcaaccaaaactaaagcacccgacgacttagttgctccggtcgtgaagaaaccacacatctattatggaagtttggaagagaaggagagggagcgtctggccaaaggagagtctgggattttggggaaagacggacttaaagcagggatcgaagctggaaatattaatataacctctggagaagtgtttgaaattgaagagcatatcagcgagcgacaggcagaagtattggctgagtttgagagaaggaagcgagcccggcagatcaatgtttccacagatgactcagaggtcaaagcttgccttagagccttgggggaacccatcacactttttggagagggtcctgctgaaagaagagaaaggttaagaaatatcctctcagttgtcggtactgatgccttgaaaaagaccaaaaaggatgatgagaagtctaaaaagtccaaagaagagtatcagcaaacctggtatcatgaaggaccaaatagcttgaaggtggcaagactatggattgctaattattcgttgcccagggcaatgaaacgcttggaagaggcccgactccataaggagattcctgagacaacaaggacctcccagatgcaagagctgcacaagtctctccggtctttgaataatttttgcagtcagattggggatgatcggcctatctcctactgtcactttagtcccaattccaagatgctggccacagcttgttggagtgggctttgcaagctctggtctgttcctgattgcaacctccttcacactcttcgagggcataacacaaatgtaggagcaattgtattccatcccaaatccactgtctccttggacccaaaagatgtcaacctggcctcttgtgcggctgatggctctgtgaagctttggagtctcgacagtgatgaaccagtggcagatattgaaggccatacagtgcgtgtggcgcgggtaatgtggcatccttcaggacgtttcctgggcaccacctgctatgaccgttcatggcgcttatgggatttggaggctcaagaggagatcctgcatcaggaaggccatagcatgggtgtgtatgacattgccttccatcaagatggctctttggctggcactgggggactggatgcatttggtcgagtttgggacctacgcacaggacgttgtatcatgttcttagaaggccacctgaaagaaatctatggaataaatttctcccccaatggctatcacattgcaaccggcagtggtgacaacacctgcaaagtgtgggacctccgacagcggcgttgcgtctacaccatccctgctcatcagaacttagtgactggtgtcaagtttgagcctatccatgggaacttcttgcttactggtgcctatgataacacagccaagatctggacgcacccaggctggtccccgctgaagactctggctggccacgaaggcaaagtgatgggcctagatatttcttccgatgggcagctcatagccacttgctcatatgacaggaccttcaagctgtggatggctgaatag

SEQ ID NO: 521 - DNA, 2724 bp, Homo sapiens
  source 1..2724: mol_type = genomic DNA
atgaacgcgccgctggacggcctgtcggtgagctcgtcctccaccggctcgctgggctcggcggccggggcgggcggcggcgggggcgcggggctgcggttactgtctgccaacgtgcgccagctgcaccaagcgctgaccgcgctgctgagcgaggcggagcgggagcagttcacccactgcctgaacgcttaccacgcgcgccgcaacgtcttcgacctggtgcgcaccctgcgcgtgctgctggacagtccggtcaagcggcgcctgctgcccatgcttcgtctggtcatcccgcgctccgaccagctgctcttcgaccaatacacggccgagggcctctacctgcccgccaccaccccctacaggcagcccgcctggggcggccccgacagcgcggggccaggggaggtgcgcctggtgagtttgcggcgtgccaaggcccacgagggcttgggcttcagcatccgtgggggctcggagcacggcgtgggcatctacgtgtctctggtggaaccaggctctctagctgagaaggaaggactgcgggtcggggaccagattctgcgcgtcaacgacaaatccctggcccgggtgacccacgcggaggccgtcaaggctctgaagggctccaagaagctggtgctgtctgtgtactcagcagggcgcatccctgggggctacgtcaccaaccacatctacacctgggtggacccgcagggccgcagcatctccccaccctcgggcctgccccagccccacggtggtgccctgaggcagcaggagggtgaccggaggagcaccctgcacctcctgcaaggaggggatgagaaaaaggtgaacctggtgctgggggacggccggtccctgggcctcacgatccgtgggggagctgagtacggccttggcatttacatcactggcgtggacccaggctctgaagcagaaggcagcgggctcaaggttggggaccagattctagaagtgaatgggcggagctttctcaacatcctacacgacgaggctgtcaggctgcttaagtcatctcggcacctcatcctgacagtgaaggacgtcgggaggctgccccatgcccgcaccactgtggacgagaccaagtggatcgccagttcccggatcagggagaccatggcgaactcggcagggtttcttggcgatctcacaacagaaggaataaacaagccaggattttacaagggcccagccggctcccaggtgaccctgagcagcctggggaaccagacacgagtgctgctggaggagcaggctcggcacctgctgaacgagcaggaacacgccaccatggcctactacctggatgagtaccgtggtggcagcgtctctgtggaggccctcgtcatggccctgttcaagctgctcaacacccacgccaagttctcactcctctctgaggtgagaggcaccatttccccgcaagacctagaacgcttcgaccacctggtgctgaggcgtgagattgagtccatgaaggcgcggcagcccccaggccccggggctggggacacctactccatggtctcctacagtgacacgggttcatccacaggcagccacggcacctccaccaccgtcagctcggccaggaacactctggacctggaggaaactggcgaggctgtccagggcaatatcaacgccctcccagatgtgtccgtggatgatgtcagatccacctcccaggggctgtcaagcttcaagccactgcctcgcccaccacctctggcccaaggcaacgacctcccactaggccagccaaggaagctggggagagaggacctccagccaccttcctccatgccttcctgctcgggcactgtcttctcggctccacagaaccgcagcccgccagcgggcaccgcacccaccccagggacctcctctgcacaggacttgccctcttcccccatctatgcctccgtctcccctgccaaccccagctccaagaggccgctggacgcccatctggccctggtcaaccaacaccccatcggccccttcccacgggtccagtcacccccgcacctgaaaagcccctctgcagaggccacagtggctgggggctgccttctgcccccatcaccctctggccacccagaccagacaggcacaaaccagcactttgtcatggtggaggtccaccgccccgacagcgagccagacgtcaatgaagtgagggcgctgccccagacgcgcacagcctctacgctctcccagctctcggacagcgggcagactctaagcgaggacagtggtgtggatgctggcgaggcagaggccagcgccccaggccgaggaaggcagtcggtgtccaccaagagcaggagtagcaaggagctgcctcggaacgagaggcccacagatggggccaacaaaccgcctggacttctggagcccacgtccactctggtccgtgtgaagaaaagtgcggccaccctgggcatcgccatcgagggtggcgccaacacccgccagcccctgcctaggattgtcactattcagagaggcggctcagctcacaactgtgggcagctcaaggtgggccacgtgattctggaagtgaatgggctgacgcttcggggcaaggagcaccgggaggccgcccgcattatcgccgaggccttcaagactaaggaccgtgactacattgactttctggtcactgagttcaatgtgatgctctag

SEQ ID NO: 522 - DNA, 1962 bp, Homo sapiens
  source 1..1962: mol_type = genomic DNA
atggctgcagcagcagcttctcacctgaacctggatgccctccgggaagtgctagaatgccccatctgcatggagtccttcacagaagagcagctgcgtcccaagcttctgcactgtggccataccatctgccgccagtgcctggagaagctattggccagtagcatcaatggtgtccgctgtcccttttgcagcaagattacccgcataaccagcttgacccagctgacagacaatctgacagtgctaaagatcattgatacagctgggctcagcgaggctgtggggctgctcatgtgtcggtcctgtgggcggcgtctgccccggcaattctgccggagctgtggtttggtgttatgtgagccctgccgggaggcagaccatcagcctcctggccactgtacactccctgtcaaagaagcagctgaggagcggcgtcgggactttggagagaagttaactcgtctgcgggaacttatgggggagctgcagcggcggaaggcagccttggaaggtgtctccaaggaccttcaggcaaggtataaagcagttctccaggagtatgggcatgaggagcgcagggtccaggatgagctggctcgctctcggaagttcttcacaggctctttggctgaagttgagaagtccaatagtcaagtggtagaggagcagagttacctgcttaacattgcagaggtgcaggctgtgtctcgctgtgactacttcctggccaagatcaagcaggcagatgtagcactactggaggagacagctgatgaggaggagccagagctcactgccagcttgcctcgggagctcaccctgcaagatgtggagctccttaaggtaggtcatgttggccccctccaaattggacaagctgttaagaagccccggacagttaacgtggaagattcctgggccatggaggccacagcgtctgctgcctctacctctgttacttttagagagatggacatgagcccggaggaagtggttgccagccctagggcctcacctgctaaacagcggggtcctgaggcagcctccaatatccagcagtgcctctttctcaagaagatgggggccaaaggcagcactccaggaatgttcaatcttccagtcagtctctacgtgaccagtcaaggtgaagtactagtcgctgaccgtggtaactatcgtatacaagtctttacccgcaaaggctttttgaaggaaatccgccgcagccccagtggcattgatagctttgtgctaagcttccttggggcagatctacccaacctcactcctctctcagtggcaatgaactgccaggggctgattggtgtgactgacagctatgataactccctcaaggtatataccttggatggccactgcgtggcctgtcacaggagccagctgagcaaaccatggggtatcacagccttgccatctggccagtttgtagtaaccgatgtggaaggtggaaagctttggtgtttcacagttgatcgaggatcaggggtggtcaaatacagctgcctatgtagtgctgtgcggcccaaatttgtcacctgtgatgctgagggcaccgtctacttcacccagggcttaggcctcaatctggagaatcggcagaatgagcaccacctggagggtggcttttccattggctctgtaggccctgatgggcagctgggtcgccagattagccacttcttctcggagaatgaggatttccgctgcattgctggcatgtgtgtggatgctcgtggtgatctcatcgtggctgacagtagtcgcaaggaaattctccattttcctaagggtgggggctatagtgtccttattcgagagggacttacctgtccggtgggcatagccctaactcctaaggggcagctgctggtcttggactgttgggatcattgcatcaagatctacagctaccatctgagaagatattccaccccatag

SEQ ID NO: 523 - DNA, 2520 bp, Homo sapiens
  source 1..2520: mol_type = genomic DNA
atgatgtctgcctcgcgcctggctgggactctgatcccagccatggccttcctctcctgcgtgagaccagaaagctgggagccctgcgtggaggtggttcctaatattacttatcaatgcatggagctgaatttctacaaaatccccgacaacctccccttctcaaccaagaacctggacctgagctttaatcccctgaggcatttaggcagctatagcttcttcagtttcccagaactgcaggtgctggatttatccaggtgtgaaatccagacaattgaagatggggcatatcagagcctaagccacctctctaccttaatattgacaggaaaccccatccagagtttagccctgggagccttttctggactatcaagtttacagaagctggtggctgtggagacaaatctagcatctctagagaacttccccattggacatctcaaaactttgaaagaacttaatgtggctcacaatcttatccaatctttcaaattacctgagtatttttctaatctgaccaatctagagcacttggacctttccagcaacaagattcaaagtatttattgcacagacttgcgggttctacatcaaatgcccctactcaatctctctttagacctgtccctgaaccctatgaactttatccaaccaggtgcatttaaagaaattaggcttcataagctgactttaagaaataattttgatagtttaaatgtaatgaaaacttgtattcaaggtctggctggtttagaagtccatcgtttggttctgggagaatttagaaatgaaggaaacttggaaaagtttgacaaatctgctctagagggcctgtgcaatttgaccattgaagaattccgattagcatacttagactactacctcgatgatattattgacttatttaattgtttgacaaatgtttcttcattttccctggtgagtgtgactattgaaagggtaaaagacttttcttataatttcggatggcaacatttagaattagttaactgtaaatttggacagtttcccacattgaaactcaaatctctcaaaaggcttactttcacttccaacaaaggtgggaatgctttttcagaagttgatctaccaagccttgagtttctagatctcagtagaaatggcttgagtttcaaaggttgctgttctcaaagtgattttgggacaaccagcctaaagtatttagatctgagcttcaatggtgttattaccatgagttcaaacttcttgggcttagaacaactagaacatctggatttccagcattccaatttgaaacaaatgagtgagttttcagtattcctatcactcagaaacctcatttaccttgacatttctcatactcacaccagagttgctttcaatggcatcttcaatggcttgtccagtctcgaagtcttgaaaatggctggcaattctttccaggaaaacttccttccagatatcttcacagagctgagaaacttgaccttcctggacctctctcagtgtcaactggagcagttgtctccaacagcatttaactcactctccagtcttcaggtactaaatatgagccacaacaacttcttttcattggatacgtttccttataagtgtctgaactccctccaggttcttgattacagtctcaatcacataatgacttccaaaaaacaggaactacagcattttccaagtagtctagctttcttaaatcttactcagaatgactttgcttgtacttgtgaacaccagagtttcctgcaatggatcaaggaccagaggcagctcttggtggaagttgaacgaatggaatgtgcaacaccttcagataagcagggcatgcctgtgctgagtttgaatatcacctgtcagatgaataagaccatcattggtgtgtcggtcctcagtgtgcttgtagtatctgttgtagcagttctggtctataagttctattttcacctgatgcttcttgctggctgcataaagtatggtagaggtgaaaacatctatgatgcctttgttatctactcaagccaggatgaggactgggtaaggaatgagctagtaaagaatttagaagaaggggtgcctccatttcagctctgccttcactacagagactttattcccggtgtggccattgctgccaacatcatccatgaaggtttccataaaagccgaaaggtgattgttgtggtgtcccagcacttcatccagagccgctggtgtatctttgaatatgagattgctcagacctggcagtttctgagcagtcgtgctggtatcatcttcattgtcctgcagaaggtggagaagaccctgctcaggcagcaggtggagctgtaccgccttctcagcaggaacacttacctggagtgggaggacagtgtcctggggcggcacatcttctggagacgactcagaaaagccctgctggatggtaaatcatggaatccagaaggaacagtgggtacaggatgcaattggcaggaagcaacatctatctga

SEQ ID NO: 524 - DNA, 1611 bp, Homo sapiens
  source 1..1611: mol_type = genomic DNA
atggcaacccgcgcgcagccggggccactcagccaggcgggaagcgctggtgttgcggcgctggcgacagtcggggttgcgagcggcccggggccggggcggccagggccgctgcaggacgagaccctgggtgtggcgtccgtgccctcgcagtggagggccgtccagggcatccgctgggagacgaaaagttgccagacggccagcattgccactgccagtgcatccgcccaggccaggaatcatgtggacgcccaggtgcagacggaggcccccgtgcctgtcagcgtgcagcccccgtcccagtatgacatacccaggctcgcagcctttcttcggagagtggaggccatggtcatccgagagctgaacaagaattggcagagccacgcgtttgatggcttcgaggtgaactggaccgagcagcagcagatggtgtcttgtctgtataccctgggctacccgccagcccaagcgcagggtctgcatgtgaccagcatctcctggaactccactggctctgtggtggcctgtgcctacggccggctggaccatggggactggagcacgcttaagtccttcgtgtgtgcctggaacctggaccggcgagacctgcgtccccagcagccgtcggccgtggtggaggtccccagcgctgtcctgtgtctggccttccaccccacgcagccctcccacgtcgcaggagggctgtacagtggtgaggtgttggtgtgggacctgagccgtcttgaggacccgctgctgtggcgcacaggcctgacggatgacacccacacagaccctgtgtcccaggtggtgtggctgcccgagcctgggcacagccaccgcttccaggtgctgagtgtggccaccgacgggaaggtgctactctggcagggcatcggggtaggccagctgcagctcacagagggcttcgccctggtcatgcagcagctgccacggagcaccaagctcaagaagcatccccgcggggagaccgaggtgggcgccacggcagtggccttctccagctttgaccctaggctgttcattctgggcacggaaggcggcttcccgctcaagtgttccctggcagctggagaggcagccctcacgcggatgcccagctccgtgcccctgcgggccccagcacagtttaccttctccccccacggcggtcccatctactctgtgagctgttcccccttccacaggaatctcttcctgagcgctgggactgacgggcatgtccacctgtactccatgctgcaggcccctcccttgacttcgctgcagctctccctcaagtatctgtttgctgtgcgctggtccccagtgcggcccttggtttttgcagctgcctctgggaaaggtgacgtgcagctgtttgatctccagaaaagctcccagaaacccacagttttgatcaagcaaacccaggatgaaagccctgtctactgtctggagttcaacagccagcagactcagctcttggctgcgggcgatgcccagggcacagtgaaggtgtggcagctgagcacagagttcacggaacaagggccccgggaagctgaggacctggactgcctggcagcagaggtggcggcctga

SEQ ID NO: 525 - DNA, 1035 bp, Homo sapiens
  source 1..1035: mol_type = genomic DNA
atggctgccgccggggccaggcctgtggagctgggcttcgccgagtcggcgccggcgtggcgactgcgcagcgagcagttccccagcaaggtgggcgggcggccggcatggctgggcgcggccgggctgccggggccccaggccctggcctgcgagctgtgcggccgcccgctctccttcctgctgcaggtgtatgcgccgctgcctggccgcccggacgccttccaccgctgcatcttcctcttctgctgccgcgagcagccgtgctgtgccggcctgcgagtttttaggaatcaactacccaggaaaaacgatttttactcatatgagccaccttctgagaatcctcccccagaaacaggagaatcagtgtgtctccagcttaagtctggtgctcatctctgcagggtttgtggctgtttaggccccaaaacgtgctccagatgccacaaagcatattactgcagcaaggagcatcagaccctagactggagattgggacataagcaggcttgtgcacaaccagatcatctggaccatataattccagaccacaacttcctttttccagaatttgaaattgtaatagaaacagaagatgagattatgcctgaggttgtggaaaaggaagattactcagagattatagggagcatgggtgaagcacttgaggaagaactggattccatggcaaaacatgaatccagggaagataaaatttttcagaagtttaaaactcagatagcccttgaaccagaacagattcttagatatggcagaggtattgcccccatctggatttctggtgaaaatattcctcaagaaaaggatattccagattgcccctgtggtgccaagagaatattggaattccaggtcatgcctcagctcctaaactacctgaaggctgacagactgggcaagagcattgactggggcatcctggctgtcttcacctgtgctgagagctgcagcttgggtactggctatacagaagaatttgtgtggaagcaggatgtaacagatacaccgtaa

SEQ ID NO: 526 - DNA, 882 bp, Homo sapiens
  source 1..882: mol_type = genomic DNA
atggcgatggagatgaggcttccagtggctcgcaagcctcttagcgagagactgggccgcgacactaagaaacatctagtggtgccgggggatacaatcactacggacacaggattcatgcggggccatggaacgtatatgggagaagagaagctcattgcatctgttgctggctctgtggagagagtaaacaagttgatctgtgtgaaagctttgaaaaccagatacattggtgaagtaggagacatcgtagtgggacgaatcacagaggttcaacagaagaggtggaaggtggagaccaactccaggctggattcggtcttgctgctctcgtccatgaaccttcctggaggagagctgaggagaagatctgcagaagatgagcttgcaatgagaggtttcttacaggaaggggaccttatcagtgctgaggtccaggcagtgttctctgacggagctgtctctttgcacacgaggagcctgaaatatggaaaactaggtcagggggttttggtccaggtttccccctccctggtgaaacggcagaagacccactttcatgatttgccatgtggtgcctcagtgattctcggtaacaacggcttcatctggatttacccaacacctgagcacaaagaagaggaagcagggggcttcattgcaaacctggagcctgtctctcttgctgatcgagaggtgatatcccggcttcggaactgcatcatctcgctggtaactcagaggatgatgctgtatgataccagcatcctgtactgctatgaagcatcccttccacatcagatcaaagacatcttaaagccagaaataatggaggagattgtgatggaaacacgccagaggcttttggaacaggagggataa

SEQ ID NO: 527 - DNA, 1935 bp, Homo sapiens
  source 1..1935: mol_type = genomic DNA
atgccgtccaaggcggagaatctgcggccctccgagccggccccgcagccgccggaagggaggacgctccaaggacagcttcccggcgctccgccggcccagcgcgcggggtccccacccgatgctccgggctccgagagccccgcgcttgcctgcagcactccggccacgcccagcggcgaggacccgccagcccgagcagcacccatcgccccgcggccccccgccaggcctcgactggagcgagccctgtccctggacgacaagggctggaggaggaggcgttttcgaggcagccaggaggacctggaagcccggaatgggaccagtccctccaggggctcagtgcagagcgagggccccggggcccccgcccacagctgctccccgccctgcctgagcacctccttgcaggaaatccccaagtcccgcggggtcctgagcagtgagagagggagcccgtcctcggggggtaaccctctctctggggtggccagcagctccccgaacctcccgcacagagacgccgccgtggcggggagctcgcccaggctgcccagcctgctgcccccgcgcccaccgcctgccctgagcctggacatcgcctccgactccctgaggacagcaaacaaggtcgactcggatcttgcagactacaagctccgcgcgcagccgctcctggtgcgggcccacagcagcctgggccccggccggccgcggagccccctggcctgcgacgactgttcccttcgctcggccaaatcctccttcagcctcctggcgcccatccgcagcaaggacgtccgcagcaggagttacctggagggcagcctcctggccagcggggccctgttgggggcggatgagctggcccgctacttcccagaccggaacgtggcactcttcgtggccacctggaacatgcagggccagaaggagctcccgcccagcctggacgagttcctgctcccagccgaggccgactatgcccaggacctgtatgtcatcggggtccaggagggctgttctgacaggcgggagtgggagactcgtctgcaggagacgctgggcccgcactatgtgctgctgtcctcggcggcccacggcgtgctctacatgtcgctcttcatccgcagggacctcatctggttctgctcagaggtggagtgctccacggtgaccacacgcatcgtgtctcagatcaagaccaagggggccttgggcatcagcttcaccttttttggcacttccttcctcttcatcacgtcccacttcacctcaggtgacgggaaggtggcggagcggctgctggactacaccaggactgtacaagccctggtcctgcccagaaatgtgcccgacaccaacccctatcgctccagcgcagcggacgtcaccacccgcttcgatgaggtgttctggtttggagacttcaacttccgcctgagtggcgggcgcacagtcgtggacgccctcctgtgccagggcctggtggtggacgtgccggcgctgctgcagcacgaccagctcatccgggagatgcggaaagggtccatcttcaagggcttccaggagccggacatccacttcctcccatcatacaagtttgacatcgggaaggacacgtacgacagcacctccaagcagaggacgccctcatacacggaccgcgtcttgtacagaagccgccacaagggtgacatctgtcctgtgagctactcttcctgccccgggatcaagacgtccgaccaccgccctgtgtatggcctcttccgggtgaaagtgaggccggggcgagacaacattccgttggcagctggcaaatttgatagagaactgtacttactaggaattaaaagacggatttcgaaggagattcagaggcagcaagcactacagagtcagaactccagcaccatctgctccgtttcttga

SEQ ID NO: 528 - DNA, 1017 bp, Homo sapiens
  source 1..1017: mol_type = genomic DNA
atggagcagcttcgcgccgccgcccgtctgcagattgttctgggccacctcggccgcccctcggccggggctgtcgtagctcatcccacttcagggactatttcctctgccagtttccatcctcaacaattccagtatactctggataataacgttctaaccctggaacagagaaaattttatgaagaaaatgggtttctagtaatcaaaaatcttgtacctgatgccgatattcaacgctttcggaatgagtttgaaaaaatctgcagaaaggaggtgaaaccattaggattaacagtaatgagagatgtgaccatttcgaaatccgaatatgctccaagtgagaagatgatcacgaaggtccaggatttccaggaagataaggagctcttcagatactgcactctccccgagattctgaaatatgtggagtgcttcactggacctaatattatggccatgcacacaatgttgataaacaaacctccagattctggcaagaagacgtcccgtcaccccctgcaccaggacctgcactatttccccttcaggcccagcgatctcatcgtttgcgcctggacggcgatggagcacatcagccggaacaacggctgtctggttgtgctcccaggcacacacaagggctccctgaagccccacgattaccccaagtgggaggggggagttaacaaaatgttccacgggatccaggactacgaggaaaacaaggcccgggtgcacctggtgatggagaagggcgacactgttttcttccatcctttgctcatccacggatctggtcagaataaaacccagggattccggaaggcaatttcctgccatttcgccagtgccgattgccactacattgacgtgaagggcaccagtcaagaaaacatcgagaaggaagttgtaggaatagcacataaattctttggagctgaaaatagcgtgaacttgaaggatatttggatgtttcgagctcgacttgtgaaaggagaaagaaccaatctttga

SEQ ID NO: 529 - DNA, 1605 bp, Homo sapiens
  source 1..1605: mol_type = genomic DNA
atgttccagtttcatgcaggctcttgggaaagctggtgctgctgctgcctgattcccgccgacagaccttgggaccggggccaacactggcagctggagatggcggacacgagatccgtgcacgagactaggtttgaggcggccgtgaaggtgatccagagtttgccgaagaatggttcattccagccaacaaatgaaatgatgcttaaattttatagcttctataagcaggcaactgaaggaccctgtaaactttcaaggcctggattttgggatcctattggaagatataaatgggatgcttggagttcactgggtgatatgaccaaagaggaagccatgattgcatatgttgaagaaatgaaaaagattattgaaactatgccaatgactgagaaagttgaagaattgctgcgtgtcataggtccattttatgaaattgtcgaggacaaaaagagtggcaggagttctgatataacctcagtccgactggagaaaatctctaaatgtttagaagatcttggtaatgttctcacttctactccaaacgccaaaaccgttaatggtaaagctgaaagcagtgacagtggagccgagtctgaggaagaagaggcccaagaagaagtgaaaggagcagaacaaagtgataatgataagaaaatgatgaagaagtcagcagaccataagaatttggaagtcattgtcactaatggctatgataaagatggctttgttcaggatatacagaatgacattcatgccagttcttccctgaatggcagaagcactgaagaagtaaagcccattgatgaaaacttggggcaaactggaaaatctgctgtttgcattcaccaagatataaatgatgatcatgttgaagatgttacaggaattcagcatttgacaagcgattcagacagtgaagtttactgtgattctatggaacaatttggacaagaagagtctttagacagctttacgtccaacaatggaccatttcagtattacttgggtggtcattccagtcaacccatggaaaattctggatttcgtgaagatattcaagtacctcctggaaatggcaacattgggaatatgcaggtggttgcagttgaaggaaaaggtgaagtcaagcatggaggagaagatggcaggaataacagcggagcaccacaccgggagaagcgaggcggagaaactgacgaattctctaatgttagaagaggaagaggacataggatgcaacacttgagcgaaggaaccaagggccggcaggtgggaagtggaggtgatggggagcgctggggctccgacagagggtcccgaggcagcctcaatgagcagatcgccctcgtgctgatgagactgcaggaggacatgcagaatgtccttcagagactgcagaaactggaaacgctgactgctttgcaggcaaaatcatcaacatcaacattgcagactgctcctcagcccacctcacagagaccatcttggtggcccttcgagatgtctcctggtgtgctaacgtttgccatcatatggccttttattgcacagtggttggtgtatttatactatcaaagaaggagaagaaaactgaactga

SEQ ID NO: 530 - DNA, 5868 bp, Homo sapiens
  source 1..5868: mol_type = genomic DNA
atgtttcgacagttttatctctggacatgtttagcttcagggatcatcctgggctctctctttgaaatctgcttgggccagtatgatgatgattgcaaactagctaggggaggaccaccagctaccatagttgctattgatgaagaaagtcggaatggtacaattctggtggacaacatgctgatcaaagggactgctggaggaccagaccccaccatagaactttctttaaaggataatgtggattactgggtgttgatggatcctgttaagcaaatgcttttcctgaacagcaccggaagagttctggatagagatccaccgatgaacatacactccattgtggtgcaggtccagtgcatcaacaaaaaagtgggcactattatctaccatgaagtgcgaatagtggtgagagacaggaatgacaactcacccactttcaagcatgaaagctactatgccacagtgaatgagctcactccagttggtaccacaatattcacaggattttcaggagacaatggagctacagatatagatgatggaccaaatggacagatagagtatgttattcagtataatccagatgatccgacatccaatgacacctttgaaattcccctaatgttgactggaaatatagtgttaaggaagaggctcaactatgaagataagactcgctactttgtcataatccaagctaatgaccgtgcccaaaatctgaatgagaggcgaaccaccaccaccactctcacagtggatgttctggatggagatgacttgggtccaatgtttcttccttgtgtccttgtgccaaacactcgtgattgccgtccactcacttatcaagctgccatacctgagttgagaactccggaagaactgaaccccattattgttacgccaccaatccaagccattgatcaggaccggaatattcaaccgccatcagataggccaggaatcctctattccatccttgttgggactcctgaggattacccacgatttttccatatgcatcctaggacagcagaacttagtctcctggagccagtaaacagagactttcaccagaaatttgatttggttattaaggctgaacaagacaatggtcatcctcttcctgcctttgccggtctacacattgaaatactggatgaaaacaatcaaagtccatattttacaatgcccagttatcaaggctatatcctggaatctgccccagtgggagcaaccatttcggacagtctcaatttgacttcacctttaagaatagtagctctggacaaggacatagaagatacaaaagacccagagcttcacctttttctgaatgactacacctcagtcttcaccgtcacacagactggtattactcgctacctcaccttacttcaaccagtggacagggaagaacagcaaacttacaccttttcgataacagcatttgatggtgtacaagaaagtgagccagtcatcgtcaatattcaagtgatggatgcaaatgataacacgccaaccttccctgaaatatcctatgatgtgtatgtttatacagacatgagacctggggacagtgtcatacagctcactgcagtcgacgcagacgaagggtcaaatggggagatcacatatgaaatccttgttggggctcagggagacttcatcatcaataaaacaacagggcttatcaccatcgctccaggggtggaaatgatagtcgggcggacttacgcactcacggtccaagcagcggataatgctcctcctgcagagcgaaggaactccatctgcactgtgtatattgaagtgcttccaccaaataatcaaagccctcctcgcttcccacagctgatgtatagccttgaaattagtgaagccatgagggttggtgctgttttattaaatctacaggcaactgatcgagagggagactcaataacatatgccattgagaatggagatcctcagagagtttttaatctttcagaaaccacggggattctaaccttagggaaagcactggacagggaaagcactgatcgctacattctgatcatcacagcttcagatggcaggccagatgggacctcaactgccacagtaaacatagtggtgacagatgtcaatgacaatgctccagtgtttgatccttatctgccaagaaatttatctgtggtggaagaagaagccaatgcctttgtgggtcaagtaaaagcaacagaccctgatgctggaataaatggtcaagtgcactacagtttgggtaactttaataatctttttcgtatcacatccaatgggagcatttacacagcagtgaagcttaacagagaagtcagggactactatgaacttgttgttgtggcaacagatggagcagtacaccctcgtcattcaactctaaccttggccatcaaggttttggacattgatgataacagtcctgtgttcaccaattcaacatacactgtccttgttgaagagaatttgccagctgggactaccatccttcaaatagaggccaaagatgtcgaccttggagcaaatgtgtcttaccggataagaagcccagaagtgaagcacttttttgcactacatccatttacaggagaactatcgcttttaaggagtttagattatgaggcatttccagaccaagaagcaagtatcacttttctggtagaggcctttgatatttatggaacaatgccacctggtattgctactgtcacagtgattgtaaaggatatgaatgattatcctcctgtctttagtaaacgaatatacaaagggatggtggctccggatgcagtcaagggtacacctatcacaacagtttatgctgaagatgcagaccctcctggattacctgcaagtcgtgtgaggtatagagtagatgatgtacagtttccttaccctgccagtatttttgaagtggaagaagattctggaagagtaataacacgagtcaatcttaatgaagaacctacaacaatttttaagttggtggtggttgcttttgatgatggggagcctgtgatgtccagcagtgccacagtgaagattcttgtcttacatcctggtgagatcccacgcttcacacaggaggaatatagacctcctccagtaagtgaacttgccaccaaagggaccatggttggtgtaatttctgctgctgccattaatcaaagtattgtgtactccattgtttcaggaaatgaagaagatacatttggaattaataacatcacaggtgttatctatgtgaatggacctctggattatgagaccaggacaagctatgtacttcgagtccaagctgattccctggaagtggtccttgccaatctccgagttccttcaaaaagcaatacagctaaagtatacattgagattcaggatgaaaataatcatcccccagtgtttcagaaaaaattctacatcggaggtgtatctgaagatgcaagaatgtttacttctgtactcagagtgaaggctactgataaagatactggcaattatagtgtcatggcctacagactcataataccaccaattaaagagggaaaagaaggatttgtagtggaaacatatacagggcttatcaaaactgctatgctcttccataatatgaggagatcctacttcaagtttcaagttattgcaactgacgactatgggaagggactgagcggcaaagccgatgtactcgtctccgtggtcaatcagctggatatgcaagtcattgtttccaatgtgcctcctactctagtggaaaaaaagatagaagatcttacagagatcttggatcgctatgttcaggaacaaattcctggtgccaaggtcgtagtggagtccattggagctcgccggcatggagatgccttttccctagaagattacaccaaatgtgacttgactgtctatgcaattgacccccaaaccaacagagccatcgatagaaatgagctttttaaatttttggatggcaaactacttgatatcaataaagactttcagccgtattatggggaaggaggacgcattctggagatccggactccagaggcagtgaccagcattaaaaagagaggagaaagtctaggatacacagaaggggccttgttggctctggccttcatcatcatcctctgctgcattcctgccatcttggtggttttggtcagctacagacagtttaaagtacgtcaagctgagtgtacaaagactgcacgaattcaggccgcattacccgcggctaaaccagcagtgccggctcctgcaccagtggcagcgcccccgccgccgccgccgcctccgccaggtgcgcatctctatgaagaacttggagacagctcaattcttttccttctctaccattttcaacaaagcaggggaaataactcagtctcagaagacaggaaacatcaacaagttgtgatgcccttttcttccaatactattgaggctcacaagtcagctcatgtagacggatcacttaagagcaacaaactgaagtctgcaagaaaattcacatttctatctgatgaggatgacttaagtgcccataatcccctttataaggaaaacataagtcaagtatcaacaaattcagacatttcacagagaacagattttgtagacccattttcacccaaaatacaagccaagagtaagtctctgaggggcccaagagaaaagattcagaggctgtggagtcagtcagtcagcttacccaggaggctgatgaggaaagttccaaatagaccagagatcatagatctgcagcagtggcaaggcaccaggcagaaagctgaaaatgaaaacactggaatctgtacaaacaaaagaggtagcagcaatccattgcttacaactgaagaggcaaatttgacagagaaagaggaaataaggcaaggtgaaacactgatgatagaaggaacagaacagttgaaatctctctcttcagactcttcattttgctttcccaggcctcacttctcattctccactttgccaactgtttcaagaactgtggaactcaaatcagaacctaatgtcatcagttctcctgctgagtgttccttggaactttctccttcaaggccttgtgttttacattcttcactctctaggagagagacacctatttgtatgttacctattgaaaccgaaagaaatatttttgaaaattttgcccatccaccaaacatctctccttctgcctgtccccttccccctcctcctcctatttctcctccttctcctcctcctgctcctgctcctcttgctcctcctcctgacatttctcctttttctcttttttgtcctcctccctctcctccttctatccctcttcctcttcctcctcctacattttttccactttccgtttcaacgtctggtcccccaacaccacctcttctacctccatttccaactcctcttcctccaccacctccttctattccttgccctccacctccttcagcttcatttctgtccacagagtgtgtctgtataacaggtgttaaatgcacgaccaacttgatgcctgccgagaaaattaagtcctctatgacacagctatcaacaacgacagtgtgtaaaacagaccctcagagagaaccaaaaggcatcctcagacacgttaaaaacttagcagaacttgaaaaatcagtagctaacatgtacagtcaaatagaaaaaaactatctacgcacaaatgtttcagaacttcaaactatgtgcccttcagaagtaacaaatatggaaatcacatctgaacaaaacaaggggagtttgaacaatattgtcgagggaactgaaaaacaatctcacagtcaatctacttcactgtaa

SEQ ID NO: 531 - DNA, 3744 bp, Homo sapiens
  source 1..3744: mol_type = genomic DNA
atgatgagagaatgggttctgctcatgtccgtgctgctctgtggcctggctggccccacacacctgttccagccaagcctggtgctggacatggccaaggtcctcttggataactactgcttcccggagaacctgctgggcatgcaggaagccatccagcaggccatcaagagccatgagattctgagcatctcagacccgcagacgctggccagtgtgctgacagccggggtgcagagctccctgaacgatcctcgcctggtcatctcctatgagcccagcacccccgagcctcccccacaagtcccagcactcaccagcctctcagaagaggaactgcttgcctggctgcaaaggggcctccgccatgaggttctggagggtaatgtgggctacctgcgggtggacagcgtcccgggccaggaggtgctgagcatgatgggggagttcctggtggcccacgtgtgggggaatctcatgggcacctccgccttagtgctggatctccggcactgcacaggaggccaggtctctggcattccctacatcatctcctacctgcacccagggaacaccatcctgcacgtggacactatctacaaccgcccctccaacaccaccacggagatctggaccttgccccaggtcctgggagaaaggtacggtgccgacaaggatgtggtggtcctcaccagcagccagaccaggggcgtggccgaggacatcgcgcacatccttaagcagatgcgcagggccatcgtggtgggcgagcggactgggggaggggccctggacctccggaagctgaggataggcgagtctgacttcttcttcacggtgcccgtgtccaggtccctggggccccttggtggaggcagccagacgtgggagggcagcggggtgctgccctgtgtggggactccggccgagcaggccctggagaaagccctggccatcctcactctgcgcagcgcccttccaggggtagtccactgcctccaggaggtcctgaaggactactacacgctggtggaccgtgtgcccaccctgctgcagcacttggccagcatggacttctccacggtggtctccgaggaagatctggtcaccaagctcaatgccggcctgcaggctgcgtctgaggatcccaggctcctggtgcgagccatcgggcccacagaaactccttcttggcccgcgcccgacgctgcagccgaagactcaccaggggtggccccagagttgcctgaggacgaggctatccggcaagcactggtggactctgtgttccaggtgtcggtgctgccaggcaatgtgggctacctgcgcttcgatagttttgctgacgcctccgtcctgggtgtgttggccccatatgtcctgcgccaggtgtgggagccgctacaggacacggagcacctcatcatggacctgcgccacaaccctggagggccatcctctgctgtgcccctgctcctgtcctacttccagggccctgaggccggccccgtgcacctcttcaccacctatgatcgccgcaccaacatcacgcaggagcacttcagccacatggagctcccgggcccacgctacagcacccaacgtggggtgtatctgctcaccagccaccgcaccgccacggccgcggaggagttcgccttccttatgcagtcgctgggctgggccacactggtaggtgagatcaccgcgggcaacctgctgcacacccgcacggtgccgctgctggacacacccgaaggcagcctcgcgctcaccgtgccggtcctcaccttcatcgacaatcacggcgaggcctggctgggtggtggagtggtgcccgatgccatcgtgctggccgaggaggccctggacaaagcccaggaagtgctggagttccaccaaagcctgggggccttggtggagggcacagggcacctgctggaggcccactatgctcggccagaggtcgtggggcagaccagtgccctcctgcgggccaagctggcccagggcgcctaccgcacagctgtggacttggagtctctggcctctcagctcacagcagacctccaggaggtgtctggggaccaccgcttgctagtgttccacagccctggcgagctggtggtagaggaagcacccccaccaccccctgctgtcccctctccagaggagctcacctaccttattgaggccctgttcaagacagaggtgctgcccggccagctgggctacctgcgttttgacgccatggctgaactggagacagtgaaggccgtggggccacagctggtgcggctggtatggcaacagctggtggacacggctgcgctggtgatcgacctgcgctacaaccctggcagctactccacggccatcccgctgctctgctcctacttctttgaggcagagccccgccagcacctgtattctgtctttgacagggccacctcaaaagtcacggaggtgtggaccttgccccaggtcgccggccagcgctacggctcacacaaggacctctacatcctgatgagccacaccagtggctctgcggccgaggcctttgcacacaccatgcaggacctgcagcgggccacggtcattggggagcccacggccggaggcgcactctctgtgggcatctaccaggtgggcagcagccccttatatgcatccatgcccacccagatggccatgagtgccaccacaggcaaggcctgggacctggctggtgtggagcccgacatcactgtgcccatgagcgaagccctttccatagcccaggacatagtggctctgcgtgccaaggtgcccacggtgctgcagacggccgggaagctggtggctgataactatgcctctgccgagctgggggccaagatggccaccaaactgagcggtctgcagagccgctactccagggtgacctcagaagtggccctagccgagatcctgggggctgacctgcagatgctctccggagacccacacctgaaggcagcccatatccctgagaatgccaaggaccgcattcctggaattgtgcccatgcagatcccttcccctgaagtatttgaagagctgatcaagttttccttccacactaacgtgcttgaggacaacattggctacttgaggtttgacatgtttggggacggtgagctgctcacccaggtctccaggctgctggtggagcacatctggaagaagatcatgcacacggatgccatgatcatcgacatgaggttcaacatcggtggccccacatcctccattcccatcttgtgctcctacttctttgatgaaggccctccagttctgctggacaagatctacagccggcctgatgactctgtcagtgaactctggacacacgcccaggttgtaggtgaacgctatggctccaagaagagcatggtcattctgaccagcagtgtgacggccggcaccgcggaggagttcacctatatcatgaagaggctgggccgggccctggtcattggggaggtgaccagtgggggctgccagccaccacagacctaccacgtggatgacaccaacctctacctcactatccccacggcccgttctgtgggggcctcggatggcagctcctgggaaggggtgggggtgacaccccatgtggttgtccctgcagaagaggctctcgccagggccaaggagatgctccagcacaaccagctgagggtgaagcggagcccaggcctgcaggaccacctgtag

SEQ ID NO: 532 - DNA, 4482 bp, Homo sapiens
  source 1..4482: mol_type = genomic DNA
atgccaaatgagggaatcccccactcaagtcaaactcaggagcaagactgtttacagagtcaacctgtcagtaataatgaagaaatggcaatcaagcaagaaagtggtggtgatggggaggtggaggagtacctctcctttcgttctgtgggtgacgggctgtccacctctgctgtggggtgcgcatcagcagctccgaggagagggccagccctgctgcacatcgaccgacatcagatccaggcagtagagcctagcgcccaggcccttgagctgcagggtttgggtgtggacgtctatgaccaggacgtgctggaacagggagtgcttcagcaggtggacaatgccatccatgaggccagccgtgcctcccagctcgttgacgtggagaaggagtatcggtcggtcctggatgacctcacgtcatgtacgacatccctaaggcaaatcaataaaattattgaacagcttagccctcaagctgccaccagcagagacatcaacaggaaactagattctgtaaaacgacagaagtataataaggaacaacagctaaaaaagatcactgcaaaacaaaagcatctccaggccatccttggaggagcagaggtgaaaattgaactagatcacgccagtctggaggaggatgcagagccggggccatccagtcttggcagcatgctcatgcctgtccaggagactgcctgggaagagctcatccgcactggccagatgacaccttttggtacccagatccctcagaaacaggagaaaaagcccagaaaaatcatgcttaatgaagcatcaggcttcgaaaagtatttggcagatcaagcaaaactgtcttttgaaaggaagaagcaaggttgtaataaaagagcagctagaaaagctccagccccagtcacgcctccagccccagtgcaaaataaaaacaaaccaaacaagaaagccagagttctgtccaaaaaagaggagcgtttgaaaaagcacatcaagaaactccagaagagggctttgcagttccaggggaaagtgggattgccaaaggcaaggagaccttgggagtcagacatgaggccagaggcagagggagactctgagggtgaagagtctgagtatttccccacagaggaggaggaagaggaggaagatgacgaggtggagggggcagaggcggacctgtctggagatggtactgactatgagctgaagcctctgcccaagggcgggaaacggcagaagaaagtgccagtgcaggagattgatgatgactttttcccaagttctggggaagaagctgaagctgcttctgtaggagaaggaggaggaggaggtcggaaagtgggaagataccgagatgatggagatgaagattattataagcagcggttaaggagatggaataaactgagactgcaggacaaagagaaacgtctgaagctggaggacgattctgaggaaagtgatgctgaatttgacgaaggttttaaagtgccaggttttctgttcaaaaagctttttaagtaccagcagacaggtgttaggtggctgtgggaattgcactgccagcaggcaggaggaattctgggagatgaaatgggattgggcaagaccatccagataattgccttcttggcaggtctgagctacagcaagatcaggactcgtggttcaaattacaggtttgaggggttgggtccaactgtaattgtctgtccaacaacagtgatgcatcagtgggtgaaggaatttcacacgtggtggcctccgttcagagtggcaattctacatgaaaccggttcctatacccacaaaaaggagaaactaattcgagatgttgctcattgtcatggaattttgatcacatcttactcctacattcgattgatgcaggatgacattagcaggtatgactggcactatgtgatcttggacgaaggacacaaaattcgaaatccaaatgctgctgtcacccttgcttgcaaacagtttcgcacccctcatcggatcattctgtctggctcaccgatgcaaaataacctccgagagctgtggtcgctctttgacttcatcttcccgggaaagttaggcacgttgcctgtgtttatggagcagttctccgtccccatcaccatggggggatattcaaatgcttccccagtacaggtcaaaactgcttacaagtgtgcatgtgtcttacgagataccataaatccatacctactgcggagaatgaagtcagatgtcaagatgagcctttctttgccagataaaaatgaacaggtcttattttgccgtcttacagatgagcagcataaagtctaccaaaatttcgttgattccaaagaagtttacaggattctcaatggagagatgcagattttctccggacttatagccctaagaaaaatttgcaaccaccctgatctcttttctggaggtcccaagaatctcaaaggtcttcctgatgatgaactagaagaagatcagtttgggtactggaaacgttctgggaaaatgattgttgttgagtctttgttgaaaatatggcacaagcagggtcagcgagtattgctgttttctcagtcaaggcagatgctggacatacttgaagtattccttagagcccaaaagtatacctatctcaagatggatggtaccactacaatagcttcaagacagccactgattacgagatacaatgaggacacatccatatttgtgtttcttctgaccacgcgggtgggcggcttaggtgtcaacctgacgggggcaaacagagttgtcatctatgacccagactggaacccaagcacggacacgcaggcccgggagcgagcatggagaataggccagaagaagcaagtgactgtgtacaggctcctgactgcgggcaccattgaagaaaagatctaccaccgacaaatcttcaagcagtttttgacaaatagagtgctaaaagacccaaaacaaaggcggtttttcaaatccaatgatctctatgagctatttactctgactagtcctgatgcatcccagagcactgaaacaagtgcaatttttgcaggaactggatcagatgttcagacacccaaatgccatctaaaaagaaggattcaaccagcctttggagcagaccatgatgttccaaaacgcaagaagttccctgcttctaacatatctgtaaatgatgccacatcatctgaagagaaatctgaggctaaaggagctgaagtaaatgcagtaacttctaatcgaagtgatcctttgaaagatgaccctcacatgagtagtaatgtaactagcaatgataggcttggagaagagacaaatgcagtatctggaccagaagagttgtcagtgattagtggaaatggggaatgttcaaattcttcaggaacaggcaaaacttctatgccatctggtgatgaaagcattgatgaaaagttaggtctttcttacaaaagagaaagacccagccaggctcaaacagaagctttttgggagaataaacaaatggaaaataatttttataagcacaagtcaaaaacaaaacatcatagtgtggcagaagaagagaccctggagaaacatctgagaccaaagcaaaagcctaagaactctaagcattgcagagacgccaagtttgaaggaactcgaattccacacctggtgaagaaaaggcgttaccagaagcaagacagtgaaaacaagagtgaggccaaggaacagagcaatgacgattatgttttggaaaagcttttcaaaaaatcagttggcgtgcacagtgtcatgaagcacgatgccatcatggatggagccagcccagattatgtactggtggaggcagaagccaaccgagtggcccaggatgccctgaaagcactgaggctctctcgtcagcggtgtctgggagcagtgtctggtgttcccacctggactggccacagggggatttctggtgcaccagcaggaaaaaagagtagatttggtaagaaaaggaattctaacttctctgtgcagcatccttcatcaacatctccaacagagaagtgccaggatggcatcatgaaaaaggagggaaaagataatgtccctgagcattttagtggaagagcagaagatgcagactcttcatccgggcccctcgcttcctcctcactcttggctaaaatgagagctagaaaccacctgattctgccagagcgtttagaaagtgaaagcgggcacctgcaggaagcttctgccctgctgcccaccacagaacacgatgaccttctggtggagatgagaaacttcatcgctttccaggcccacactgatggccaggccagcaccagggagatactgcaggagtttgaatccaagttatctgcatcacagtcttgtgtcttccgagaactattgagaaatctgtgcactttccatagaacttctggtggtgaaggaatttggaaactcaagccagaatactgctaa

SEQ ID NO: 533 - DNA, 2754 bp, Homo sapiens
  source 1..2754: mol_type = genomic DNA
atgatcgccgcgcagctcctggcctattacttcacggagctgaaggatgaccaggtcaaaaagattgacaagtatctctatgccatgcggctctccgatgaaactctcatagatatcatgactcgcttcaggaaggagatgaagaatggcctctcccgggattttaatccaacagccacagtcaagatgttgccaacattcgtaaggtccattcctgatggctctgaaaagggagatttcattgccctggatcttggtgggtcttcctttcgaattctgcgggtgcaagtgaatcatgagaaaaaccagaatgttcacatggagtccgaggtttatgacaccccagagaacatcgtgcacggcagtggaagccagctttttgatcatgttgctgagtgcctgggagatttcatggagaaaaggaagatcaaggacaagaagttacctgtgggattcacgttttcttttccttgccaacaatccaaaatagatgaggccatcctgatcacctggacaaagcgatttaaagcgagcggagtggaaggagcagatgtggtcaaactgcttaacaaagccatcaaaaagcgaggggactatgatgccaacatcgtagctgtggtgaatgacacagtgggcaccatgatgacctgtggctatgacgaccagcactgtgaagtcggcctgatcatcggcactggcaccaatgcttgctacatggaggaactgaggcacattgatctggtggaaggagacgaggggaggatgtgtatcaatacagaatggggagcctttggagacgatggatcattagaagacatccggacagagtttgacagggagatagaccggggatccctcaaccctggaaaacagctgtttgagaagatggtcagtggcatgtacttgggagagctggttcgactgatcctagtcaagatggccaaggagggcctcttatttgaagggcggatcaccccggagctgctcacccgagggaagtttaacaccagtgatgtgtcagccatcgaaaagaataaggaaggcctccacaatgccaaagaaatcctgacccgcctgggagtggagccgtccgatgatgactgtgtctcagtccagcacgtttgcaccattgtctcatttcgctcagccaacttggtggctgccacactgggcgccatcttgaaccgcctgcgtgataacaagggcacacccaggctgcggaccacggttggtgtcgacggatctctttacaagacgcacccacagtattcccggcgtttccacaagactctaaggcgcttggtgccagactccgatgtgcgcttcctcctctcggagagtggcagcggcaagggggctgccatggtgacggcggtggcctaccgcttggccgagcagcaccggcagatagaggagaccctggctcatttccacctcaccaaggacatgctgctggaggtgaagaagaggatgcgggccgagatggagctggggctgaggaagcagacgcacaacaatgccgtggttaagatgctgccctccttcgtccggagaactcccgacgggaccgagaatggtgacttcttggccctggatcttggaggaaccaatttccgtgtgctgctggtgaaaatccgtagtgggaaaaagagaacggtggaaatgcacaacaagatctacgccattcctattgaaatcatgcagggcactggggaagagctgtttgatcacattgtctcctgcatctctgacttcttggactacatggggatcaaaggccccaggatgcctctgggcttcacgttctcatttccctgccagcagacgagtctggacgcgggaatcttgatcacgtggacaaagggttttaaggcaacagactgcgtgggccacgatgtagtcaccttactaagggatgcgataaaaaggagagaggaatttgacctggacgtggtggctgtggtcaacgacacagtgggcaccatgatgacctgtgcttatgaggagcccacctgtgaggttggactcattgttgggaccggcagcaatgcctgctacatggaggagatgaagaacgtggagatggtggagggggaccaggggcagatgtgcatcaacatggagtggggggcctttggggacaacgggtgtctggatgatatcaggacacactacgacagactggtggacgaatattccctaaatgctgggaaacaaaggtatgagaagatgatcagtggtatgtacctgggtgaaatcgtccgcaacatcttaatcgacttcaccaagaagggattcctcttccgagggcagatctctgagacgctgaagacccggggcatctttgagaccaagtttctctctcagatcgagagtgaccgattagcactgctccaggtccgggctatcctccagcagctaggtctgaatagcacctgcgatgacagtatcctcgtcaagacagtgtgcggggtggtgtccaggagggccgcacagctgtgtggcgcaggcatggctgcggttgtggataagatccgcgagaacagaggactggaccgtctgaatgtgactgtgggagtggacgggacactctacaagcttcatccacacttctccagaatcatgcaccagacggtgaaggaactgtcaccaaaatgtaacgtgtccttcctcctgtctgaggatggcagcggcaagggggccgccctcatcacggccgtgggcgtgcggttacgcacagaggcaagcagctaa

SEQ ID NO: 534 - DNA, 10065 bp, Homo sapiens
  source 1..10065: mol_type = genomic DNA
atggggcgccatgttgccaccagctgccacgtggcctggcttttggtgctgatctctggatgctggggccaggtgaaccggctgcccttcttcaccaaccacttctttgatacatacctgctgatcagcgaggacacgcctgtgggttcttctgtgacccagttgctggcccaagacatggacaatgaccccctggtgtttggcgtgtctggggaggaggcctctcgcttctttgcagtggagcctgacactggcgtggtgtggctccggcagccactggacagagagaccaagtcagagttcaccgtggagttctctgtcagcgaccaccagggggtgatcacacggaaggtgaacatccaggttggggatgtgaatgacaacgcgcccacatttcacaatcagccctacagcgtccgcatccctgagaatacaccagtggggacgcccatcttcatcgtgaatgccacagaccccgacttgggggcagggggcagcgtcctctactccttccagcccccctcccaattcttcgccattgacagcgcccgcggtatcgtcacagtgatccgggagctggactacgagaccacacaggcctaccagctcacggtcaacgccacagatcaagacaagaccaggcctctgtccaccctggccaacttggccatcatcatcacagatgtccaggacatggaccccatcttcatcaacctgccttacagcaccaacatctacgagcattctcctccgggcacgacggtgcgcatcatcaccgccatagaccaggataaaggacgtccccggggcattggctacaccatcgtttcagggaataccaacagcatctttgccctggactacatcagcggagtgctgaccttgaatggcctgctggaccgggagaaccccctgtacagccatggcttcatcctgactgtgaagggcacggagctgaacgatgaccgcaccccatctgacgctacagtcaccacgaccttcaatatcctggttattgacatcaatgacaatgccccggagttcaacagctccgagtacagcgtggccatcactgagctggcacaggtcggctttgcccttccactcttcatccaggtggtggacaaggatgagaatttgggcctgaacagcatgtttgaggtgtacttggtggggaacaactcccaccacttcatcatctccccgacctccgtccaggggaaggcggacattcgtattcgggtggccatcccactggactacgagaccgtggaccgctacgactttgatctctttgccaatgagagtgtgcctgaccatgtgggctatgccaaggtgaagatcactctcatcaatgaaaatgacaaccggcccatcttcagccagccactgtacaacatcagcctgtacgagaacgtcaccgtggggacctctgtgctgacagtcctggcaactgacaatgatgcaggcacctttggggaagtcagctacttcttcagtgatgaccctgacaggttctcgctggacaaggacacgggactcatcatgctgattgccaggctggactatgagctcatccagcgcttcaccctgacgatcattgcccgggacgggggcggcgaggagaccacaggccgggtcaggatcaatgtgttggatgtcaacgacaacgtgcccaccttccagaaggatgcctacgtgggtgctctgcgggagaacgagccttctgtcacacagctggtgcggctccgggcaacagatgaagactcccctcccaacaaccagatcacctacagcattgtcagtgcatctgcctttggcagctacttcgacatcagcctgtacgagggctatggagtgatcagcgtcagtcgccccctggattatgaacagatatccaatgggctgatttatctgacggtcatggccatggatgctggcaacccccctctcaacagcaccgtccctgtcaccatcgaggtgtttgatgagaatgacaaccctcccaccttcagcaagcccgcctacttcgtctccgtggtggagaacatcatggcaggagccacggtgctgttcctgaatgccacagacctggaccgctcccgggagtacggccaggagtccatcatctactccttggaaggctccacccagtttcggatcaatgcccgctcaggggaaatcaccaccacgtctctgcttgaccgagagaccaagtctgaatacatcctcatcgttcgcgcagtggacgggggtgtgggccacaaccagaaaactggcatcgccaccgtaaacatcaccctcctggacatcaatgacaaccaccccacgtggaaggacgcaccctactacatcaacctggtggagatgacccctccagactctgatgtgaccacggtggtggctgttgacccagacctgggggagaatggcaccctggtgtacagcatccagccacccaacaagttctacagcctcaacagcaccacgggcaagatccgcaccacccacgccatgctggaccgggagaaccccgacccccatgaggccgagctgatgcgcaaaatcgtcgtctctgttactgactgtggcaggccccctctgaaagccaccagcagtgccacagtgtttgtgaacctcttggatctcaatgacaatgaccccacctttcagaacctgccttttgtggccgaggtgcttgaaggcatcccggcgggggtctccatctaccaagtggtggccatcgacctcgatgagggcctgaacggcctggtgtcctaccgcatgccggtgggcatgccccgcatggacttcctcatcaacagcagcagcggcgtggtggtcaccaccaccgagctggaccgcgagcgcatcgcggagtaccagctgcgggtggtggccagtgatgcaggcacgcccaccaagagctccaccagcacgctcaccatccatgtgctggatgtgaacgacgagacgcccaccttcttcccggccgtgtacaatgtgtctgtgtccgaggacgtgccacgcgagttccgggtggtctggctgaactgcacggacaacgacgtgggcctcaatgcagagctcagctacttcatcacaggtggcaacgtggatgggaagttcagcgtgggttaccgcgatgccgttgtgagaaccgtggtgggcctggaccgggagaccacagccgcctacatgctcatcctggaggccatcgacaacggccctgtagggaagcgacacacgggcacagccaccgtgttcgtcactgtcctggatgtgaatgacaaccggcccatctttctgcagagcagctatgaggccagcgtccctgaggacatccctgaaggccacagcatcttgcagctgaaagccacggacgcagatgagggcgagtttgggcgtgtgtggtaccgcatcctccatggtaaccatggcaacaacttccggatccatgtcagcaatgggctcctgatgcgagggccccggcccctggaccgggagcggaactcatcccacgtgctgatagtggaggcctacaaccacgacctgggccccatgcggagctccgtcagggtgattgtgtacgtggaggacatcaacgatgaggcccccgtgttcacacagcagcagtacagccgtctggggcttcgagagaccgcaggcattggaacgtcagtcatcgtggtccaagccacagaccgagactctggggatggtggcctggtgaactaccgcatcctgtcgggcgcagaggggaagtttgagattgacgagagcacagggcttatcatcaccgtgaattacctggactacgagaccaagaccagctacatgatgaatgtgtcggccactgaccaggccccgcccttcaaccagggcttctgcagcgtctacatcactctgctcaacgagctggacgaggccgtgcagttctccaatgcctcatacgaggctgccatcctggagaatctggcactgggtactgagattgtgcgggtccaggcctactccatcgacaacctcaaccaaatcacgtaccgcttcaacgcctacaccagcacccaggccaaagccctcttcaagatagacgccatcacgggtgtgatcacagtccagggcctggtggaccgtgagaagggcgacttctataccttgacagtggtggcagatgacggcggccccaaggtggactccaccgtgaaggtctacatcactgtgctggacgagaatgacaacagcccccggtttgacttcacctccgactcggcggtcagcatacccgaggactgccctgtgggccagcgagtggctactgtcaaggcctgggaccctgatgctggcagcaatgggcaggtggtcttctccctggcctctggcaacatcgcgggggcctttgagatcgtcaccaccaatgactccattggcgaagtgtttgtggccaggcccctggacagagaagagctggatcactacatcctccaggttgtggcttctgaccgaggcacccctccacggaagaaggaccacatcctgcaggtgaccatcctggacatcaatgacaaccctccagtcatcgagagcccctttggatacaatgtcagtgtgaatgagaacgtgggtggaggtactgctgtggtccaggtgagagccactgaccgtgacatcgggatcaacagtgttctgtcctactacatcaccgagggcaacaaggacatggccttccgcatggaccgcatcagcggtgagatcgccacacggcctgccccgcctgaccgcgagcgccagagcttctaccacctggtggccactgtggaggacgagggcaccccaaccctgtcggccaccacgcacgtgtacgtgaccattgtggatgagaatgataacgcgcccatgttccagcagccccactatgaggtgctgctggatgagggcccagacacgctcaacaccagcctcatcaccatccaggcactggacctggatgagggtcccaacggcacagtcacctatgccatcgtcgcaggcaacatcgtcaacaccttccgcatcgacagacacatgggtgtcatcactgctgccaaagagctggactacgagatcagccacggccgctacaccctgatcgtcactgccacagaccagtgccccatcttatcccaccgcctcacctctaccaccacggtgcttgtgaatgtgaatgacatcaacgacaatgtgcctaccttcccccgggactatgagggaccatttgaagtcactgagggccagccggggcccagagtgtggaccttcctggcccatgaccgagactcaggacccaacgggcaggtggagtacagcatcatggatggagaccctctgggggagtttgtgatctctcctgtggagggggtgctaagggtccggaaggacgtggagctggaccgggagaccatcgccttctacaacctgaccatctgtgcccgtgaccgggggatgcccccactcagctccacaatgctggtggggatccgggtgctggacatcaacgacaacgaccctgtgctgctgaacctgcccatgaacatcaccatcagcgagaacagccctgtctccagctttgtcgcccatgtcctggccagtgacgctgacagtggctgcaatgcacgcctcaccttcaacatcactgcgggcaaccgcgagcgggccttcttcatcaatgccacgacagggatcgtcactgtgaaccggcccctggaccgcgagcggatcccagagtacaagctgaccatttctgtgaaggacaacccggagaatccacgcatagccaggagggattatgacttgcttctgatcttcctttctgatgagaatgacaaccaccccctcttcactaaaagcacctaccaggcagaggtgatggaaaactctcccgctggcacccctctcacggtgctcaatgggcccatcctggccctggatgcagaccaagacatctacgccgtggtgacctaccagctgctgggtgcccagagtggcctctttgacatcaacagcagcaccggtgtggtgaccgtgaggtcaggtgtcatcattgaccgggaggcattctcgccacccatcctggagctgctgctgctggctgaggacatcgggctgctcaacagcacggcccacctgctcatcaccatcctggatgacaatgacaaccggcccacctttagccctgccaccctcactgtccatctgctagagaactgcccgcctggattctcagtccttcaagtcacagccacagatgaggacagtggcctcaatggggagctggtctaccgaatagaagctggggctcaggaccgcttcctcattcatctggtcaccggggtcatccgtgttggtaatgccaccatcgacagagaggagcaggagtcctacaggctaacggtggtggccaccgaccggggcaccgttcctctctcgggcacagccattgtcaccattctgatcgatgacatcaatgactcccgccccgagttcctcaaccccatccagacagtgagcgtgctggagtcggctgagccaggcactgtcattgccaatatcacggccattgaccacgacctcaacccaaagctagagtaccacattgtcggcattgtggccaaggacgacactgatcgcctggtgcccaaccaggaggacgcctttgctgtgaatatcaacacaggatctgtaatggtgaagtcccccatgaatcgggagctggttgccacctatgaggtcactctctcagtgattgacaatgccagcgacctaccagagcgctctgtcagtgtgccaaatgccaagctgactgtcaacgtcctggacgtcaatgacaatacgccccagttcaagccctttgggatcacctactacatggagcggatcctggagggggccacccctgggaccacactcattgctgtggcagccgtggaccctgacaagggccttaatgggctggtcacctacaccctgctggacctggtgcccccagggtatgtccagctggaggactcctcggcagggaaggtcattgccaaccggacagtggactacgaggaggtgcactggctcaactttaccgtgagggcctcagacaacgggtccccgccccgggcagctgagatccctgtctacctggaaatcgtggacatcaatgacaacaaccccatctttgaccagccctcctaccaggaggctgtctttgaggatgtgcctgtgggcacaatcatcctgacagtcactgccactgatgctgactcaggcaactttgcactcattgagtacagccttggagatggagagagcaagtttgccatcaaccccaccacgggtgacatctatgtgctgtcttctctggaccgggagaagaaggaccactatatcctgactgccttggccaaagacaaccctggggatgtagccagcaaccgtcgcgaaaattcagtgcaggtggtgatccaagtgctggatgtcaatgactgccggccacagttctccaagccccagttcagcacaagcgtgtatgagaatgagccggcgggcacctcggtcatcaccatgatggccactgaccaggatgaaggtcccaatggagagttgacctactcacttgagggccctggcgtggaggccttccatgtggacatggactcgggcttggtgaccacacagcggccactgcagtcctacgagaagttcagtctgaccgtggtggccacagatggtggagagcccccactctggggcaccaccatgctcctggtggaggtcatcgacgtcaatgacaaccgccctgtctttgtgcgcccacccaacggcaccatcctccacatcagagaggagatcccgctgcgctccaacgtgtacgaggtctacgccacggacaaggatgagggcctcaacggggcggtgcgctacagcttcctgaagactgcgggcaaccgggactgggagttcttcatcatcgacccaatcagcggcctcatccagactgctcagcgcctggaccgcgagtcgcaggcggtgtacagcctcatcttggtggccagcgacctgggccagccagtgccatacgagactatgcagccgctgcaggtggccctggaggacatcgatgacaacgaaccccttttcgtgaggcctccaaaaggcagcccccagtaccagctgctgacagtgcctgagcactcaccacgcggcaccctcgtgggcaacgtgacaggcgcagtggatgcagatgagggccccaacgcgatcgtgtactacttcatcgcagccggcaacgaagagaagaacttccatctgcagcccgatgggtgtctgctggtgctgcgggacctggaccgggagcgagaagccatcttctccttcatcgtcaaggcctccagcaatcgcagctggacacctccccgtggaccctccccaaccctcgacctggttgctgacctcacactgcaggaggtgcgcgttgtgctagaggacatcaacgaccagccaccacgcttcaccaaggctgagtacactgcaggggtggccaccgacgccaaggtgggctcagagttgatccaggtgctggccctggatgcagacattggcaacaacagccttgtcttctacagcattctggccatccactacttccgggcccttgccaacgactctgaagatgtgggccaggtcttcaccatggggagcatggacggcattctgcgcaccttcgacctcttcatggcctacagccccggctacttcgtggtggacattgtggcccgagacctggcaggccacaacgacacggccatcatcggcatctacatcctgagggacgaccagcgcgtcaagatcgtcattaacgagatccccgaccgtgtgcgcggcttcgaggaggagttcatccacctgctctccaacatcactggggccattgtcaatactgacaatgtgcagttccatgtggacaagaagggccgggtgaactttgcgcagacagaactgcttatccacgtggtgaaccgcgataccaaccgcatcctggacgtggaccgggtgatccagatgatcgatgagaacaaggagcagctacggaatcttttccggaactacaacgtcctggacgtgcagcctgccatctctgtccggctgccggatgacatgtctgccctgcagatggcgatcatcgtcctggctatcctcctgttcctggccgccatgctctttgtcctcatgaactggtactacaggactgtacacaagaggaagctcaaggccattgtggctggctcagctgggaatcgtggcttcatcgacatcatggacatgcctaacaccaacaagtactcctttgatggagccaaccctgtgtggctggatcccttctgtcggaacctggagctggccgcccaggcggagcatgaggatgacctaccggagaacctgagtgagatcgccgacctgtggaacagccccacgcgcacccatggaacttttgggcgtgagccagcagctgtcaagcctgatgatgaccgatacctgcgggctgccatccaggagtatgacaacattgccaagctgggccagatcattcgtgaggggccaatcaagggctcgctgctgaaggtggtcctggaggattacctgcggctcaaaaagctctttgcacagcggatggtgcaaaaagcctcctcctgccactcctccatctctgagctgatacagactgagctggacgaggagccaggagaccacagcccagggcagggtagcctgcgcttccgccacaagccaccagtggagctcaaggggcccgatgggatccatgtggtgcacggcagcacgggcacgctgctggccaccgacctcaacagcctgcccgaggaagaccagaagggcctgggccgctcgctggagacgctgaccgctgccgaggccactgccttcgagcgcaacgcccgcacagaatccgccaaatccacacccctgcacaaacttcgcgacgtgatcatggagacccccctggagatcacagagctgtga

SEQ ID NO: 535 - DNA, 2580 bp, Homo sapiens
  source 1..2580: mol_type = genomic DNA
atgaggcgctgccggtgggccgccctggccctggggctgctgcgcctctgcttggctcaggccaacttcgccccgcacttcttcgacaacggggtcggcagcaccaacggaaacatggctctgttcagcctcccagaggacacccctgtaggctctcacgtatacaccctgaatgggacagaccctgagggagaccccatctcctaccacatcagctttgaccccagcactagaagcgtcttttctgttgaccccacttttggaaacatcaccctggttgaagagctggacagagagagggaagatgagattgaagccatcatcagcatttctgatggcctgaatctggtggccgaaaaagtcgtgatcctggtgaccgatgccaatgatgaggcgcccaggttcatccaggagccttatgttgccctggttcccgaggacatacctgctgggagcatcatctttaaggtccatgcagtggacagggacacaggctctggagggagtgtcacctacttcctgcagaacctgcactccccatttgccgtggaccgccacagcggtgtgctgcgcctccaggctggggccactctggactacgagaggtcccggacccactacatcaccgtggtcgccaaggatggcggtgggaggcttcatggggctgatgtggtgttctcagccaccaccacggtcacggtcaatgtggaggatgttcaggacatggcccctgtcttcgtgggcacaccctactatggctatgtgtacgaggacacccttccgggctcggaggtactgaaggtggtcgccatggatggagaccggggcaaacccaatcgaattctctacagccttgtaaatgggaacgatggagcctttgaaattaatgagacatctggagccatctccatcactcagagcccggcccagctccagagagaggtgtatgagctgcatgtacaggtgactgaaatgagccctgcggggagcccagctgcccaggccaccgtcccagtcaccatcaggattgtggacctcaacaaccacccgccaacattctatggagagagcggaccccaaaacaggtttgagctgtccatgaatgagcacccaccccagggagagatcctgcggggcctcaagatcaccgtcaatgactccgaccagggagccaatgccaaattcaacttgcagctggtgggacccaggggcatcttccgagtggttccacagacagtcctgaatgaagcccaagtcacaatcattgtggagaactcagctgccattgactttgaaaagtccaaagtattaaccttcaagctcctggctgttgaagtgaacaccccagagaagttcagttccacagcggatgttgtgatccagctcctggacaccaatgacaatgtccccaagttcgactccctctactacgttgccaggattcctgagaacgccccagggggctccagcgtggtggctgtcacagctgtggatccagatacaggaccctggggcgaagtgaaatattccacctatgggactggggcagacctcttcctgatccacccatccactgggcttatctacacccagccctgggctagcctggacgctgaggccactgccaggtacaacttctatgtgaaggcagaggacatggaaggcaagtacagcgtagctgaggtgtttatcacactgctggatgtcaatgaccacccccctcagtttggaaagagcgttcagaagaagacgatggtgctagggaccccagtgaaaattgaggccatagacgaggatgcagaggaacccaacaacctggtggactattccatcacccatgcagagcccgccaacgtgttcgacatcaattcccacacgggggagatctggctcaagaattccatccgctccctggatgccctgcacaacatcacacctggaagggactgcctatggtccctagaggtgcaggccaaggaccggggctccccatccttcagcaccacagccttactcaagattgacatcacagatgctgagaccctctcccggagccccatggctgccttcctgatacagaccaaggacaaccccatgaaggccgtgggtgtgctggccggcaccatggccaccgtcgtggccatcactgtcctcatctccaccgccaccttctggcgcaacaagaagtctaacaaggtcctgccaatgcggcgggtgctccgcaagcggcccagccctgcgccccgcaccatccgcattgagtggctcaagtccaagagcaccaaagccgctaccaagttcatgctcaaagagaaacctcccaatgagaactgtaacaacaacagcccagaaagctctctgctcccgagagctccggctctccctccaccacccagcgtggcgcccagcactggcgcagcccagtggaccgtgcctactgtctctggctctctcactccgcagccgacccaacccccgccaaaacccaaaactatgggaagccccgtccagtcaactctgatctctgagctcaagcaaaagtttgagaagaagagtgtgcacaacaaggcttacttctag

SEQ ID NO: 536 - DNA, 876 bp, Homo sapiens
  source 1..876: mol_type = genomic DNA
atggcagagaccagtgccctgcccactggcttcggggagctcgaggtgctggctgtggggatggtgctactggtggaagctctctccggtctcagcctcaataccctgaccatcttctctttctgcaagaccccggagctgcggactccctgccacctactggtgctgagcttggctcttgcggacagtgggatcagcctgaatgccctcgttgcagccacatccagccttctccggcgctggccctacggctcggacggctgccaggctcacggcttccagggctttgtgacagcgttggccagcatctgcagcagtgcagccatcgcatgggggcgttatcaccactactgcacccgtagccagctggcctggaactcagccgtctctctggtgctcttcgtgtggctgtcttctgccttctgggcagctctgccccttctgggttggggtcactacgactatgagccactggggacatgctgcaccctggactactccaagggggacagaaacttcaccagcttcctcttcaccatgtccttcttcaacttcgccatgcccctcttcatcacgatcacttcctacagtctcatggagcagaaactggggaagagtggccatctccaggtaaacaccactctgccagcaaggacgctgctgctcggctggggcccctatgccatcctgtatctatacgcagtcatcgcagacgtgacttccatctcccccaaactgcagatggtgcccgccctcattgccaaaatggtgcccacgatcaatgccatcaactatgccctgggcaatgagatggtctgcaggggaatctggcagtgcctctcaccgcagaagagggagaaggaccgaaccaagtga

SEQ ID NO: 537 - DNA, 3171 bp, Homo sapiens
  source 1..3171: mol_type = genomic DNA
atggcgtcgcagccaaattcgtctgcgaagaagaaagaggagaaggggaagaacatccaggtggtggtgagatgcagaccatttaatttggcagagcggaaagctagcgcccattcaatagtagaatgtgatcctgtacgaaaagaagttagtgtacgaactggaggattggctgacaagagctcaaggaaaacatacacttttgatatggtgtttggagcatctactaaacagattgatgtttaccgaagtgttgtttgtccaattctggatgaagttattatgggctataattgcactatctttgcgtatggccaaactggcactggaaaaacttttacaatggaaggtgaaaggtcacctaatgaagagtatacctgggaagaggatcccttggctggtataattccacgtacccttcatcaaatttttgagaaacttactgataatggtactgaattttcagtcaaagtgtctctgttggagatctataatgaagagctttttgatcttcttaatccatcatctgatgtttctgagagactacagatgtttgatgatccccgtaacaagagaggagtgataattaaaggtttagaagaaattacagtacacaacaaggatgaagtctatcaaattttagaaaagggggcagcaaaaaggacaactgcagctactctgatgaatgcatactctagtcgttcccactcagttttctctgttacaatacatatgaaagaaactacgattgatggagaagagcttgttaaaatcggaaagttgaacttggttgatcttgcaggaagtgaaaacattggccgttctggagctgttgataagagagctcgggaagctggaaatataaatcaatccctgttgactttgggaagggtcattactgcccttgtagaaagaacacctcatgttccttatcgagaatctaaactaactagaatcctccaggattctcttggagggcgtacaagaacatctataattgcaacaatttctcctgcatctctcaatcttgaggaaactctgagtacattggaatatgctcatagagcaaagaacatattgaataagcctgaagtgaatcagaaactcaccaaaaaagctcttattaaggagtatacggaggagatagaacgtttaaaacgagatcttgctgcagcccgtgagaaaaatggagtgtatatttctgaagaaaattttagagtcatgagtggaaaattaactgttcaagaagagcagattgtagaattgattgaaaaaattggtgctgttgaggaggagctgaatagggttacagagttgtttatggataataaaaatgaacttgaccagtgtaaatctgacctgcaaaataaaacacaagaacttgaaaccactcaaaaacatttgcaagaaactaaattacaacttgttaaagaagaatatatcacatcagctttggaaagtactgaggagaaacttcatgatgctgccagcaagctgcttaacacagttgaagaaactacaaaagatgtatctggtctccattccaaactggatcgtaagaaggcagttgaccaacacaatgcagaagctcaggatatttttggcaaaaacctgaatagtctgtttaataatatggaagaattaattaaggatggcagctcaaagcaaaaggccatgctagaagtacataagaccttatttggtaatctgctgtcttccagtgtctctgcattagataccattactacagtagcacttggatctctcacatctattccagaaaatgtgtctactcatgtttctcagatttttaatatgatactaaaagaacaatcattagcagcagaaagtaaaactgtactacaggaattgattaatgtactcaagactgatcttctaagttcactggaaatgattttatccccaactgtggtgtctatactgaaaatcaatagtcaactaaagcatattttcaagacttcattgacagtggccgataagatagaagatcaaaaaaaggaactagatggctttctcagtatactgtgtaacaatctacatgaactacaagaaaataccatttgttccttggttgagtcacaaaagcaatgtggaaacctaactgaagacctgaagacaataaagcagacccattcccaggaactttgcaagttaatgaatctttggacagagagattctgtgctttggaggaaaagtgtgaaaatatacagaaaccacttagtagtgtccaggaaaatatacagcagaaatctaaggatatagtcaacaaaatgacttttcacagtcaaaaattttgtgctgattctgatggcttctcacaggaactcagaaattttaaccaagaaggtacaaaattggttgaagaatctgtgaaacactctgataaactcaatggcaacctggaaaaaatatctcaagagactgaacagagatgtgaatctctgaacacaagaacagtttatttttctgaacagtgggtatcttccttaaatgaaagggaacaggaacttcacaacttattggaggttgtaagccaatgttgtgaggcttcaagttcagacatcactgagaaatcagatggacgtaaggcagctcatgagaaacagcataacatttttcttgatcagatgactattgatgaagataaattgatagcacaaaatctagaacttaatgaaaccataaaaattggtttgactaagcttaattgctttctggaacaggatctgaaactggatatcccaacaggtacgacaccacagaggaaaagttatttatacccatcaacactggtaagaactgaaccacgtgaacatctccttgatcagctgaaaaggaaacagcctgagctgttaatgatgctaaactgttcagaaaacaacaaagaagagacaattccggatgtggatgtagaagaggcagttctggggcagtatactgaagaacctctaagtcaagagccatctgtagatgctggtgtggattgttcatcaattggcggggttccatttttccagcataaaaaatcacatggaaaagacaaagaaaacagaggcattaacacactggagaggtctaaagtggaagaaactacagagcacttggttacaaagagcagattacctctgcgagcccagatcaacctttaa

SEQ ID NO: 538 - DNA, 606 bp, Homo sapiens
  source 1..606: mol_type = genomic DNA
atgaagtgggtgtgggcgctcttgctgttggcggcgctgggcagcggccgcgcggagcgcgactgccgagtgagcagcttccgagtcaaggagaacttcgacaaggctcgcttctctgggacctggtacgccatggccaagaaggaccccgagggcctctttctgcaggacaacatcgtcgcggagttctccgtggacgagaccggccagatgagcgccacagccaagggccgagtccgtcttttgaataactgggacgtgtgcgcagacatggtgggcaccttcacagacaccgaggaccctgccaagttcaagatgaagtactggggcgtagcctcctttctccagaaaggaaatgatgaccactggatcgtcgacacagactacgacacgtatgccgtgcagtactcctgccgcctcctgaacctcgatggcacctgtgctgacagctactccttcgtgttttcccgggaccccaacggcctgcccccagaagcgcagaagattgtaaggcagcggcaggaggagctgtgcctggccaggcagtacaggctgatcgtccacaacggttactgcgatggcagatcagaaagaaaccttttgtag

SEQ ID NO: 539 - DNA, 2577 bp, Homo sapiens
  source 1..2577: mol_type = genomic DNA
atgggtgagatcaaccaagttgccgtggagaaatacctggaggagaaccctcagtttgccaaggagtactttgacaggaagttgcgggtggaggtgctgggagaaatcttcaagaacagccaggtgccagtccagtccagcatgtccttctctgagctgacccaggtggaggagtcagccctgtgcttggagctgctgtggaccgtgcaggaggaggggggcaccccagagcagggggttcacagggccctgcagaggctggcccacctgctccaggctgaccgctgcagcatgttcctgtgccggtcccggaacggcatacctgaggtggcctctaggttgctggatgtcacccccacctccaagtttgaggacaacctggtgggccctgacaaagaagttgtgtttccattggacattgggatagtgggttgggctgctcacacgaagaaaactcataatgtcccagatgtgaaaaagaacagccatttttctgacttcatggacaagcaaactgggtatgtcactaagaacctgctggcaaccccgatcgtggtgggcaaggaggttcttgctgtgatcatggcagttaacaaagtaaatgcatctgaattttccaaacaggatgaagaggtcttttccaaatacctcaactttgtgtctatcatcctaaggcttcatcacaccagctacatgtacaatattgaatcccgaagaagccagatccttatgtggtcagccaataaagtatttgaagaactcacagatgttgagcgacagtttcacaaagcgctctacacggttagatcatatctgaactgtgaacgatactccattggactgctggacatgaccaaggagaaggaattctacgatgaatggccaatcaagcttggagaagtagagccttataaaggtccaaagacacctgatggcagggaagtcaacttttataaaatcattgattacattttacatggaaaagaagagatcaaagtgattccgacgcctcctgcagaccactggacactcattagtgggttgccaacatatgttgctgaaaatggatttatctgtaacatgatgaatgcccctgcggatgaatacttcacatttcagaaaggacctgtagacgaaactggttgggtcattaagaatgttttgtccctgcctattgtcaacaagaaagaagatattgtgggagtggctacattttacaacaggaaggatggaaaacctttcgatgagcatgatgaatacattaccgagactctcacacaatttcttggatggtctcttttaaatactgacacctacgataagatgaataagctagaaaacagaaaggacattgctcaggaaatgctcatgaaccaaaccaaagccactcctgaagaaattaagtccattttgaaatttcaagagaagttaaatgttgatgtaattgacgactgtgaagaaaaacaacttgttgcaattttgaaagaggacttgccagacccacgctcagcagaactgtacgaattccgcttcagtgacttcccccttacagagcacggattgattaaatgtggaatacgactgttttttgaaataaatgtggtggagaaattcaaagtacctgtagaggttcttaccagatggatgtacactgtgaggaaagggtaccgagctgtcacttaccacaattggcggcatgggttcaacgtggggcagaccatgtttactttgctgatgacaggaagattaaagaagtactacacagatctcgaagcctttgccatgcttgctgctgctttctgccatgatattgaccacagaggcaccaataatttgtaccagatgaaatccacgtctccattagcaagacttcatggttcttctattttggagaggcaccacctggagtacagtaagactctgttgcaggatgagagtttaaacatcttccagaacctaaataagcggcagtttgaaacagttattcatttgttcgaggtcgcaataatagcaactgacctggctttatatttcaagaagaggaccatgtttcaaaaaattgttgatgcctgtgaacaaatgcaaacggaagaagaagccatcaaatatgtaactgttgatccaaccaagaaagagattatcatggcaatgatgatgacggcatgtgacttgtctgctattaccaagccctgggaggtgcaaagtcaggtagcacttatggttgcaaatgaattttgggaacaaggagatctggagagaacagtgttgcagcaacaacccattcctatgatggacagaaacaaaagagatgaattacctaaacttcaagttggatttattgattttgtttgtacttttgtatataaggagttctcacggtttcacaaagaaatcacacctatgctgagtggtcttcagaataacagagtagaatggaaatcactagctgatgagtatgatgcaaagatgaaggtcattgaagaggaggcaaaaaagcaagaaggaggagccgaaaaagctgctgaagattcaggaggtggtgatgacaaaaagtccaaaacatgtttaatgttgtaa

SEQ ID NO: 540 - DNA, 1254 bp, Homo sapiens
  source 1..1254: mol_type = genomic DNA
atggatatgcactgcaaagcagaccccttctccgcgatgcacccagggcacgggggtgtgaaccagctcgggggggtgtttgtgaacggccggcccctacccgacgtggtgaggcagcgcatcgtggagctggcccaccagggtgtgcggccctgtgacatctcccggcagctgcgggtcagccacggctgtgtcagcaaaatcctgggcaggtactacgagaccggcagcatcaagccgggtgtgatcggtggctccaagcccaaagtggcgacgcccaaagtggtggacaagattgctgaatacaaacgacagaacccgactatgttcgcctgggagattcgagaccggctcctggccgagggcatctgtgacaatgacacagtgcccagcgtctcttccatcaacagaatcatccggaccaaagttcagcagcctttccacccaacgccggatggggctgggacaggagtgaccgcccctggccacaccattgttcccagcacggcctcccctcctgtttccagcgcctccaatgacccagtgggatcctactccatcaatgggatcctggggattcctcgctccaatggtgagaagaggaaacgtgatgaagttgaggtatacactgatcctgcccacattagaggaggtggaggtttgcatctggtctggactttaagagatgtgtctgagggctcagtccccaatggagattcccagagtggtgtggacagtttgcggaagcacttgcgagctgacaccttcacccagcagcagctggaagctttggatcgggtctttgagcgtccttcctaccctgacgtcttccaggcatcagagcacatcaaatcagaacaggggaacgagtactccctcccagccctgacccctgggcttgatgaagtcaagtcgagtctatctgcatccaccaaccctgagctgggcagcaacgtgtcaggcacacagacatacccagttgtgactggtcgtgacatggcgagcaccactctgcctggttacccccctcacgtgccccccactggccagggaagctaccccacctccaccctggcaggaatggtgcctgggagcgagttctccggcaacccgtacagccacccccagtacacggcctacaacgaggcttggagattcagcaaccccgccttactaagttccccttattattatagtgccgccccccggggctccgcccctgccgctgctgccgctgcctatgaccgccactag

SEQ ID NO: 541 - DNA, 3102 bp, Homo sapiens
  source 1..3102: mol_type = genomic DNA
atggcgcagggtttcgcagtgggcttcgacccactgggcctaggagacctgagctccggctctctgagctccctctcctcccgaggccacctaggcagcgactcaggctccaccgcaacgcgatacctgctaaggaagcaacaacggctgctgaacgggcccccccgcggaatccgagcctcatcgcccatgggacgcgtcatcctcatcaactcccccatcgaagccaacagtgatgaaagtgacatcatccattcagtccgggtggagaagagtccagcagggaggctgggcttcagcgtgcgcgggggctcagagcatggcctgggcatcttcgtcagcaaagtggaggaaggcagcagtgcagagcgggctggcctgtgcgtgggggacaagatcacggaggtgaatgggctgagcctggagagcaccaccatgggtagcgccgtaaaggtgctgaccagcagcagccgcctgcacatgatggttcggcgcatgggccgtgtgccgggcatcaagttctccaaggagaagaccacgtgggtggatgtggtgaatcggcgcctggtagtggagaagtgcggttcaacaccctccgacaccagctcagaagatggtgtccggcgcatcgtccacctatacacaacctccgacgacttctgcctgggcttcaacatccgtgggggcaaggagtttggcctgggcatctatgtgtccaaagtggaccatggtgggctggccgaggagaatggcatcaaggtgggggaccaggtcctggcagccaacggtgtcaggtttgacgacatcagccacagccaggccgtggaggtgctgaagggccaaacgcacatcatgctgaccatcaaggagaccggccggtatcctgcctacaaggagatggtttctgagtactgctggctggaccgactgagcaacggggtgctgcagcagctgtccccggcctctgagagcagctccagcgtctcttcgtgcgcctccagcgccccctacagctcgggctccctgccgtcggaccgcatggacatctgcctcgggcaggaggagcccggcagccgcggcccaggctgggggcgggcggacacagccatgcagacggagcccgatgcgggaggccgggtggagacctggtgcagcgtgcggcccacagtcatcctcagggacaccgccatccgctcggacggcccccatcccggccgccgccttgactctgcgctctctgagtctcccaagacggctttgctgctggccctcagccgaccccggccccccatcacgcgctcccagagctatctgaccttgtgggaggagaagcagcagcggaagaaggagaagtcggggtcccctggggagaagggtgccctgcagcgctccaagacgctgatgaacctcttcttcaagggagggcggcaggggaggctagcgcgggacgggcgcagagaggcctggacactggacagcgggagcctggccaaaacttaccctcgcctggacatagagaaagcagggggcgtgggcccggtacagaagtttgtcacctggagactgagacgtgaccaggagaggggccgggccctgctgtctgccaggtctgggagtccctccagccagctgcctaatgtggatgagcaggttcaggcctgggagagccggcggcccctcattcaggacctggcccagaggctgctgactgatgacgaggtgctggctgtcacccgccactgctcccggtatgtgcacgagggaggcatagaggacctggtgaggcccctgctggccatcctcgacaggccggagaagctgctactgctgcaggacatcaggagtgtggtggcccccacagacctgggccgcttcgacagcatggtgatgcttgtggagctggaggcttttgaggccctcaagagcagggcagtccggcctcctgctttgagaccagcccggcaggacacgccacccaagcgtcaccttatcacccccgtgcctgacagccgcggaggcttctacctgctgccggtgaacggcttcccggaagaggaagataatggggagctgagggagcggctgggggccctcaaggtctccccaagtgcctctgcccctcgccacccccataaagggatcccccctctacaagacgtgccagtagatgccttcacccccctccgaattgcctgcacaccccctccccagctaccccccgtggctccccggcccctgcggcctaactggctgctgacagaacccctgagccgagagcaccctccgcagagccagatccggggccgggctcagagccgtagccgcagccgtagccgcagccgcagccgcagcagccggggtcaaggcaagtctccaggtagacgctccccatccccggtgcctacccctgcccccagcatgaccaatgggcgctaccacaagcctcggaaggccagaccccctctgccacgacctctggatggggaggcagccaaggtgggggccaagcaagggccctcggagagtggaactgaggggacggccaaggaggcagccatgaagaaccccagtggcgagctgaagacagtgacactgtccaagatgaagcagtccttaggtatcagcatttctgggggcattgagtccaaggtgcagcccatggtgaagatagagaagatcttccctgggggggccgctttcctcagtggggccctgcaggctggcttcgagcttgtggcagtggacggagagaatctagagcaggtgacccaccagcgtgcagtagacaccatccgtcgggcttatcgaaacaaggcccgggagcccatggagcttgtggtcagggtccccgggcccagcccacggccctcaccctctgactcatcagcccttactgatgggggccttcctgctgaccacttgcctgcccaccaaccccttgatgctgctccagttcctgcccactggctcccagaacctcccaccaatccccagactcctcccactgatgccaggctcctccagccaactcccagcccagccccctccccagccctccagactcctgattctaagcccgcaccctccccacgcatcccatga

SEQ ID NO: 542 - DNA, 549 bp, Homo sapiens
  source 1..549: mol_type = genomic DNA
atgggcttgctctcaattttgcgcaagttgaaaagtgcaccagaccaggaggtgagaatacttctcctgggcttggataatgctggcaagaccactcttctgaagcagcttgcatctgaagacatcagccacatcacacctacacagggtttcaacatcaaaagtgtacaatcacaaggttttaaactgaatgtatgggacattggtggacagaggaaaatcagaccatactggaagaattattttgaaaataccgatattcttatatatgtaatcgacagtgcagacagaaaaagatttgaagagacgggtcaggaactagcggaattactggaggaagaaaaactaagttgtgtgccagtgctcatctttgctaataagcaggatttgctcacagcagcccctgcctctgaaattgcagaaggactgaacctgcataccatccgcgaccgagtctggcagatccagtcttgctcagctctcacaggagagggcgttcaggatggcatgaactgggtctgcaaaaatgtcaatgcaaagaagaaataa

SEQ ID NO: 543 - DNA, 279 bp, Homo sapiens
  source 1..279: mol_type = genomic DNA
atgcttaaagctgcagcaaaaagaccagaactttcaggaaaaaacactatatccaacaactcagatatggcagaagtgaagtcaatgttccgggaagttcttccaaagcaagggccactgtttgtggaagatataatgacaatggtgctgtgtaaacccaaacttttacccttaaaatctctgactctggaaaaactagagaaaatgcatcaagcagcacagaatacaattcgccaacaagaaatggcagaaaaggatcaacggcaaataacccactga

SEQ ID NO: 544 - DNA, 324 bp, Homo sapiens
  source 1..324: mol_type = genomic DNA
atgctgcgcctatacccaggaccgatggtaactgaggcggaggggaaaggagggcctgagatggcaagtctgtcctcctcggtggttcctgtgtccttcatttccactctgcgagagtctgtgctggaccctggagttggtggagaaggagccagtgacaagcagaggagcaaactgtctttatcacactccatgatcccagctgctaaaatccacactgagctctgcttaccagccttcttctctcctgctggaacccagaggaggttccagcagcctcagcaccacctgacactgtctatcatccacactgcagcaaggtga

SEQ ID NO: 545 - DNA, 1443 bp, Homo sapiens
  source 1..1443: mol_type = genomic DNA
atgcagatcccgcgcgccgctcttctcccgctgctgctgctgctgctggcggcgcccgcctcggcgcagctgtcccgggccggccgctcggcgcctttggccgccgggtgcccagaccgctgcgagccggcgcgctgcccgccgcagccggagcactgcgagggcggccgggcccgggacgcgtgcggctgctgcgaggtgtgcggcgcgcccgagggcgccgcgtgcggcctgcaggagggcccgtgcggcgaggggctgcagtgcgtggtgcccttcggggtgccagcctcggccacggtgcggcggcgcgcgcaggccggcctctgtgtgtgcgccagcagcgagccggtgtgcggcagcgacgccaacacctacgccaacctgtgccagctgcgcgccgccagccgccgctccgagaggctgcaccggccgccggtcatcgtcctgcagcgcggagcctgcggccaagggcaggaagatcccaacagtttgcgccataaatataactttatcgcggacgtggtggagaagatcgcccctgccgtggttcatatcgaattgtttcgcaagcttccgttttctaaacgagaggtgccggtggctagtgggtctgggtttattgtgtcggaagatggactgatcgtgacaaatgcccacgtggtgaccaacaagcaccgggtcaaagttgagctgaagaacggtgccacttacgaagccaaaatcaaggatgtggatgagaaagcagacatcgcactcatcaaaattgaccaccagggcaagctgcctgtcctgctgcttggccgctcctcagagctgcggccgggagagttcgtggtcgccatcggaagcccgttttcccttcaaaacacagtcaccaccgggatcgtgagcaccacccagcgaggcggcaaagagctggggctccgcaactcagacatggactacatccagaccgacgccatcatcaactatggaaactcgggaggcccgttagtaaacctggacggtgaagtgattggaattaacactttgaaagtgacagctggaatctcctttgcaatcccatctgataagattaaaaagttcctcacggagtcccatgaccgacaggccaaaggaaaagccatcaccaagaagaagtatattggtatccgaatgatgtcactcacgtccagcaaagccaaagagctgaaggaccggcaccgggacttcccagacgtgatctcaggagcgtatataattgaagtaattcctgataccccagcagaagctggtggtctcaaggaaaacgacgtcataatcagcatcaatggacagtccgtggtctccgccaatgatgtcagcgacgtcattaaaagggaaagcaccctgaacatggtggtccgcaggggtaatgaagatatcatgatcacagtgattcccgaagaaattgacccatag

SEQ ID NO: 546 - DNA, 1320 bp, Homo sapiens
  source 1..1320: mol_type = genomic DNA
atgttttccaaactagcacatttgcagaggtttgctgtacttagtcgcggagttcattcttcagtggcttctgctacatctgttgcaactaaaaaaacagtccaaggccctccaacctctgatgacatttttgaaagggaatataagtatggtgcacacaactaccatcctttacctgtagccctggagagaggaaaaggtatttacttatgggatgtagaaggcagaaaatattttgacttcctgagttcttacagtgctgtcaaccaagggcattgtcaccccaagattgtgaatgctctgaagagtcaagtggacaaattgaccttaacatctagagctttctataataacgtacttggtgaatatgaggagtatattactaaacttttcaactaccacaaagttcttcctatgaatacaggagtggaggctggagagactgcctgtaaactagctcgtaagtggggctataccgtgaagggcattcagaaatacaaagcaaagattgtttttgcagctgggaacttctggggtaggacgttgtctgctatctccagttccacagacccaaccagttacgatggttttggaccatttatgccgggattcgacatcattccctataatgatctgcccgcactggagcgtgctcttcaggatccaaatgtggctgcgttcatggtagaaccaattcagggtgaagcaggcgttgttgttccggatccaggttacctaatgggagtgcgagagctctgcaccaggcaccaggttctctttattgctgatgaaatacagacaggattggccagaactggtagatggctggctgttgattatgaaaatgtcagacctgatatagtcctccttggaaaggccctttctgggggcttataccctgtgtctgcagtgctgtgtgatgatgacatcatgctgaccattaagccaggggagcatgggtccacatacggtggcaatccactaggctgccgagtggccatcgcagcccttgaggttttagaagaagaaaaccttgctgaaaatgcagacaaattgggcattatcttgagaaatgaactcatgaagctaccttctgatgttgtaactgccgtaagaggaaaaggattattaaacgctattgtcattaaagaaaccaaagattgggatgcttggaaggtgtgtctacgacttcgagataatggacttctggccaagccaacccatggcgacattatcaggtttgcgcctccgctggtgatcaaggaggatgagcttcgagagtccattgaaattattaacaagaccatcttgtctttctga

SEQ ID NO: 547 - DNA, 2163 bp, Homo sapiens
  source 1..2163: mol_type = genomic DNA
atggaggaggcggaggagctgctcttggaggggaagaaggcgctgcaactcgcccgcgagccgcgcctgggcctggacttaggatggaacccttccggagaaggctgtacgcagggcctcaaagacgtcccacccgagccgacccgagacatcctcgctttaaagagccttccccggggcttggcccttggcccctcactcgccaaggaacagcgcttgggggtctggtgtgtcggggaccccctgcagcccggcctgctgtgggggccgctggaagaggagtctgcctccaaggagaagggcgagggagtaaagccacggcaggaggagaacctgtcattaggcccatggggagacgtgtgtgcctgtgagcagagttctggctggactagcttggtacaacggggcaggctggagagtgagggaaatgtggccccagtgcggatcagcgagaggcttcatctgcaagtgtaccagctggtgctgccaggctctgaactgctgctgtggccccagccttcctctgagggcccaagtctcacccagcctgggctggacaaagaggcagctgtagcagtggtgacagaagtggagtctgctgtacagcaggaagtggcctcccctggggaggatgcagcagaaccttgcatagatcctggttcccagtcaccctctggcatccaggcagagaatatggtgagccctggacttaagttcccaacccaggaccgaatttccaaggatagccagccacttggcccattgcttcaggatggcgacgtggatgaggaatgcccggcccaggcacagatgccacctgaacttcagagcaattcggctacccagcaggacccagatggcagtggagccagtttctcatcttctgccaggggcacccagccgcatggctacctggccaagaagttacacagccccagtgatcagtgcccacccagagcaaagaccccagagcctggagcccagcagtctggcttccctacactctcgcggagccctcctggcccagcaggaagctccccaaagcaggggcgacggtaccggtgtggagagtgtggcaaggcattcctacagctgtgccacctaaagaagcacgcatttgtgcacacgggccacaagccctttctttgcactgagtgtggcaagagctatagctcagaggagagcttcaaagcccatatgctgggccaccgtggggtgcggcccttcccctgtccacaatgcgacaaggcctatggcacccagcgagacctcaaagagcaccaggtggtacattcaggtgcccggccctttgcttgtgaccagtgtggcaaggcctttgcccgccggccctccctgcggctgcatcgcaagacccaccaggtgccagctgcccctgccccttgcccatgccctgtgtgtgggcggcccctggccaaccagggctccctgcggaaccatatgaggctccatacaggagaaaagcctttcctgtgcccgcactgtggccgggcgtttcgtcagcggggcaacctgcgtgggcatttgcggctccacaccggggagcgtccttaccgctgcccacactgtgccgatgccttcccccagctgcctgaactgcggcgccatctcatctcacacaccggggaggcccacttgtgcccggtgtgtggcaaggccctccgagacccacacacgctccgagctcacgagcgcctgcactccggagagaggccctttccctgtccccagtgtggccgtgcttacacgctggccaccaagctgcggcgccacctcaaatctcacttggaggacaagccctaccgctgccccacctgtggcatgggctacaccctcccgcagagcctcaggcggcatcagctcagtcaccggcctgaggcaccctgcagcccaccctctgtgccttctgctgcttctgagcccactgtggtgctcctgcaggctgagccacaactgctggacacacacagagaggaggaagtctcccccgccagggatgttgttgaggtcaccatttcagaaagccaggagaagtgctttgtggtgccagaggagccagatgccgcccccagcctggtgctaatccataaggacatgggcctcggcgcctgggcagaggtggtggaggtggagatgggcacctga

SEQ ID NO: 548 - DNA, 1521 bp, Homo sapiens
  source 1..1521: mol_type = genomic DNA
atgacttccaagccgcattccgactggattccctacagtgtcttagatgatgagggcagaaacctgaggcagcagaagcttgatcggcagcgggccctgctggagcagaagcagaagaagaagcgccaggagcccctgatggtgcaggccaatgcagatgggcggccccggagccggcgggcccggcagtcagaggaacaagcccccctggtggagtcctacctcagcagcagtggcagcaccagctaccaagttcaagaggccgactcactcgccagtgtgcagctgggagccacgcgcccaacagcaccagcttcagccaagagaaccaaggcggcagctacagcagggggccagggtggcgccgctaggaaggagaagaagggaaagcacaaaggcaccagcgggccagcagcactggcagaagacaagtctgaggcccaaggcccagtgcagattctgactgtgggccagtcagaccacgcccaggacgcaggggagacggcagctggtgggggcgaacggcccagcgggcaggatctccgtgccacgatgcagaggaagggcatctccagcagcatgagctttgacgaggatgaggaggatgaggaggagaatagctccagctcctcccagctaaatagtaacacccgccccagctctgctactagcaggaagtccgtcagggaggcagcctcagcccctagcccaacagctccagagcaaccagtggacgttgaggtccaggatcttgaggagtttgcactgaggccggccccccagggtatcaccatcaaatgccgcatcactcgggacaagaaagggatggaccggggcatgtaccccacctactttctgcacctggaccgtgaggatgggaagaaggtgttcctcctggcgggaaggaagagaaagaagagtaaaacttccaattacctcatctctgtggacccaacagacttgtctcgaggaggggacagctatatcgggaaactgcggtccaacttgatgggcaccaagttcactgtttatgacaatggagtcaaccctcagaaggcctcatcctccactttggaaagtggaaccttacgtcaggagctggcagctgtgtgctacgagacaaacgtcttaggcttcaaggggcctcggaagatgagcgtgattgtcccaggcatgaacatggttcatgagagagtctctatccgcccccgcaacgagcatgagacactgctagcacgctggcagaataagaacacggagagtatcatcgagctgcaaaacaagacacctgtctggaatgatgacacacagtcctatgtactcaacttccatgggcgcgtcacacaggcctccgtgaagaacttccagatcatccatggcaatgacccggactacatcgtgatgcagtttggccgggtagcagaggatgtgttcaccatggattacaactacccgctgtgtgcactgcaggcctttgccattgccctgtccagcttcgacagcaagctggcgtgcgagtag

SEQ ID NO: 549 - DNA, 1281 bp, Homo sapiens
  source 1..1281: mol_type = genomic DNA
attgagcccagcagctggagcggcagtgagagccctgccgaaaacatggaaaggatgagtgactctgcagataagccaattgacaatgatgcagaaggggtctggagccccgacatcgagcaaagctttcaggaggccctggctatctatccaccatgtgggaggaggaaaatcatcttatcagacgaaggcaaaatgtatggtaggaatgaattgatagccagatacatcaaactcaggacaggcaagacgaggaccagaaaacaggtgtctagtcacattcaggttcttgccagaaggaaatctcgtgattttcattccaagctaaaggatcagactgcaaaggataaggccctgcagcacatggcggccatgtcctcagcccagatcgtctcggccactgccattcataacaagctggggctgcctgggattccacgcccgaccttcccaggggcgccggggttctggccgggaatgattcaaacagggcagccaggatcctcacaagacgtcaagccttttgtgcagcaggcctaccccatccagccagcggtcacagcccccattccagggtttgagcctgcatcggccccagctccctcagtccctgcctggcaaggtcgctccattggcacaaccaagcttcgcctggtggaattttcagcttttctcgagcagcagcgagacccagactcgtacaacaaacacctcttcgtgcacattgggcatgccaaccattcttacagtgacccattgcttgaatcagtggacattcgtcagatttatgacaaatttcctgaaaagaaaggtggcttaaaggaactgtttggaaagggccctcaaaatgccttcttcctcgtaaaattctgggctgatttaaactgcaatattcaagatgatgctggggctttttatggtgtaaccagtcagtacgagagttctgaaaatatgacagtcacctgttccaccaaagtttgctcctttgggaagcaagtagtagaaaaagtagagacggagtatgcaaggtttgagaatggccgatttgtataccgaataaaccgctccccaatgtgtgaatatatgatcaacttcatccacaagctcaaacacttaccagagaaatatatgatgaacagtgttttggaaaacttcacaattttattggtggtaacaaacagggatacacaagaaactctactctgcatggcctgtgtgtttgaagtttcaaatagtgaacacggagcacaacatcatatttacaggcttgtaaaggactga

SEQ ID NO: 550 - DNA, 1659 bp, Homo sapiens
  source 1..1659: mol_type = genomic DNA
atggaccgaaaagtggcccgagaattccggcataaggtggattttctgattgaaaatgatgcagagaaggactatctctatgatgtgctgcgaatgtaccaccagaccatggacgtggccgtgctcgtgggagacctgaagctggtcatcaatgaacccagccgtctgcctctgtttgatgccattcggccgctgatcccactgaagcaccaggtggaatatgatcagctgaccccccggcgctccaggaagctgaaggaggtgcgtctggaccgtctgcaccccgaaggcctcggcctgagtgtgcgtggtggcctggagtttggctgtgggctcttcatctcccacctcatcaaaggcggtcaggcagacagcgtcgggctccaggtaggggacgagatcgtccggatcaatggatattccatctcctcctgtacccatgaggaggtcatcaacctcattcgaaccaagaaaactgtgtccatcaaagtgagacacatcggcctgatccccgtgaaaagctctcctgatgagcccctcacttggcagtatgtggatcagtttgtgtcggaatctgggggcgtgcgaggcagcctgggctcccctggaaatcgggaaaacaaggagaagaaggtcttcatcagcctggtaggctcccgaggccttggctgcagcatttccagcggccccatccagaagcctggcatctttatcagccatgtgaaacctggctccctgtctgctgaggtgggattggagataggggaccagattgtcgaagtcaatggcgtcgacttctctaacctggatcacaaggaggctgtaaatgtgctgaagagtagccgcagcctgaccatctccattgtagctgcagctggccgggagctgttcatgacagaccgggagcggctggcagaggcgcggcagcgtgagctgcagcggcaggagcttctcatgcagaagcggctggcgatggagtccaacaagatcctccaggagcagcaggagatggagcggcaaaggagaaaagaaattgcccagaaggcagcagaggaaaatgagagataccggaaggagatggaacagattgtagaggaggaagagaagtttaagaagcaatgggaagaagactggggctcaaaggaacagctactcttgcctaaaaccatcactgctgaggtacacccagtaccccttcgcaagccaaagtatgatcagggagtggaacctgagctcgagcccgcagatgacctggatggaggcacggaggagcagggagagcaggatttccggaaatatgaggaaggctttgacccctactctatgttcaccccagagcagatcatggggaaggatgtccggctcctacgcatcaagaaggagggatccttagacctggccctggaaggcggtgtggactcccccattgggaaggtggtcgtttctgctgtgtatgagcggggagctgctgagcggcatggtggcattgtgaaaggggacgagatcatggcaatcaacggcaagattgtgacagactacaccctggctgaggctgaggctgccctgcagaaggcctggaatcagggcggggactggatcgaccttgtggttgccgtctgccccccaaaggagtatgacgatgagctgaccttcttctga

SEQ ID NO: 551 - DNA, 438 bp, Homo sapiens
  source 1..438: mol_type = genomic DNA
atgctgccacggggactgaagatggcgccgcgaggtaaacggttgtcctccaccccgctggaaatcctgttctttctgaacgggtggtataatgctacctatttcctgctggaacttttcatatttctgtataaaggtgtcctgctaccatatccaacagctaacctagtactggatgtggtgatgctcctcctttatcttggaattgaagtaattcgcctgttttttggtacaaagggaaacctctgccagcgaaagatgccgctcagtattagcgtggccttgaccttcccatctgccatgatggcctcctattacctgctgctgcagacctacgtactccgcctggaagccatcatgaatggcatcttgctcttcttctgtggctcagagcttttacttgaggtgctcaccttggctgctttctccaggatttga

SEQ ID NO: 552 - DNA, 1758 bp, Homo sapiens
  source 1..1758: mol_type = genomic DNA
atgaccatcacttacacaagccaagtggctaatgcccgcttaggctccttctcccgcctgctgctgtgctggcggggcagcatctacaagctgctatatggcgagttcttaatcttcctgctctgctactacatcatccgctttatttataggctggccctcacggaagaacaacagctgatgtttgagaaactgactctgtattgcgacagctacatccagctcatccccatttccttcgtgctgggcttctacgtgacgctggtcgtgacccgctggtggaaccagtacgagaacctgccgtggcccgaccgcctcatgagcctggtgtcgggcttcgtcgaaggcaaggacgagcaaggccggctgctgcggcgcacgctcatccgctacgccaacctgggcaacgtgctcatcctgcgcagcgtcagcaccgcagtctacaagcgcttccccagcgcccagcacctggtgcaagcaggctttatgactccggcagaacacaagcagttggagaaactgagcctaccacacaacatgttctgggtgccctgggtgtggtttgccaacctgtcaatgaaggcgtggcttggaggtcgaatccgggaccctatcctgctccagagcctgctgaacgagatgaacaccttgcgtactcagtgtggacacctgtatgcctacgactggattagtatcccactggtgtatacacaggtggtgactgtggcggtgtacagcttcttcctgacttgtctagttgggcggcagtttctgaacccagccaaggcctaccctggccatgagctggacctcgttgtgcccgtcttcacgttcctgcagttcttcttctatgttggctggctgaaggtggcagagcagctcatcaacccctttggagaggatgatgatgattttgagaccaactggattgtcgacaggaatttgcaggtgtccctgttggctgtggatgagatgcaccaggacctgcctcggatggagccggacatgtactggaataagcccgagccacagcccccctacacagctgcttccgcccagttccgtcgagcctcctttatgggctccaccttcaacatcagcctgaacaaagaggagatggagttccagcccaatcaggaggacgaggaggatgctcacgctggcatcattggccgcttcctaggcctgcagtcccatgatcaccatcctcccagggcaaactcaaggaccaaactactgtggcccaagagggaatcccttctccacgagggcctgcccaaaaaccacaaggcagccaaacagaacgttaggggccaggaagacaacaaggcctggaagcttaaggctgtggacgccttcaagtctgccccactgtatcagaggccaggctactacagtgccccacagacgcccctcagccccactcccatgttcttccccctagaaccatcagcgccgtcaaagcttcacagtgtcacaggcatagacaccaaagacaaaagcttaaagactgtgagttctggggccaagaaaagttttgaattgctctcagagagcgatggggccttgatggagcacccagaagtatctcaagtgaggaggaaaactgtggagtttaacctgacggatatgccagagatccccgaaaatcacctcaaagaacctttggaacaatcaccaaccaacatacacactacactcaaagatcacatggatccttattgggccttggaaaacagggatgaagcacattcctaa

SEQ ID NO: 553 - DNA, 927 bp, Homo sapiens
  source 1..927: mol_type = genomic DNA
atgaatcccatcgtagtggtccacggcggcggagccggtcccatctccaaggatcggaaggagcgagtgcaccagggcatggtcagagccgccaccgtgggctacggcatcctccgggagggcgggagcgccgtggatgccgtagagggagctgtcgtcgccctggaagacgatcccgagttcaacgcaggttgtgggtctgtcttgaacacaaatggtgaggttgaaatggatgctagtatcatggatggaaaagacctgtctgcaggagcagtgtccgcagtccagtgtatagcaaatcccattaaacttgctcggcttgtcatggaaaagacacctcattgctttctgactgaccaaggcgcagcgcagtttgcagcagctatgggggttccagagattcctggagaaaaactggtgacagagagaaacaaaaagcgcctggaaaaagagaagcatgaaaaaggtgctcagaaaacagattgtcaaaaaaacttgggaaccgtgggtgctgttgccttggactgcaaagggaatgtagcctacgcaacctccacaggcggtatcgttaataaaatggtcggccgcgttggggactcaccgtgtctaggagctggaggttatgccgacaatgacatcggagccgtctcaaccacagggcatggggaaagcatcctgaaggtgaacctggctagactcaccctgttccacatagaacaaggaaagacggtagaagaggctgcggacctatcgttgggttatatgaagtcaagggttaaaggtttaggtggcctcatcgtggttagcaaaacaggagactgggtggcaaagtggacctccacctccatgccctgggcagccgccaaggacggcaagctgcacttcggaattgatcctgacgatactactatcaccgaccttccctaa

SEQ ID NO: 554 - DNA, 1056 bp, Homo sapiens
  source 1..1056: mol_type = genomic DNA
atggcgccggtgttgcccctggtgctgcccctgcagccccgcatccgcctggcacaagggctctggctcctctcctggctgctggcgctggctggtggcgtcatcctcctctgtagtgggcacctcctggtccagctaaggcaccttggcaccttcctggctccctcctgtcagttccctgtcctgccccaggctgccctggcagcgggcgcggtggctctgggcacaggactagtgggtgtaggagccagccgggcaagtctgaatgcagctctataccctccctggcgaggggtcctgggcccgctgctggtggctggcacggctggtgggggggggctcctggtcgtcggcctcgggctagccctggctttgcctgggagtctggatgaggcgctggaggagggcctggtgactgccttggctcactacaaggacacagaggtgcctgggcactgtcaggccaaaaggctggtggatgagctgcaactgaggtaccactgctgcgggcgccacgggtacaaggattggtttggggtccagtgggtcagcagccgttacctggatcccggtgaccgggatgtggctgaccggatccagagcaatgtagaaggcctatacctgactgatggggtccctttctcctgttgcaacccccactcaccccggccttgcctgcaaaaccgtctttcagactcctacgcccaccccctgttcgatccccgacaacccaaccaaaacctctgggcccaagggtgccatgaggtgctgctggagcacttgcaggacttggcaggcacactgggtagcatgctggctgtcaccttcctactgcaggctctggtgctccttggcctgcggtacctgcaaacagcactggaggggcttggaggggtcattgatgcgggaggagagacccagggctatctctttcccagtgggctgaaagatatgctgaaaacagcatggctacagggaggggttgcctgcaggccagcacctgaggaggccccaccaggagaagcacctcccaaggaggatctatctgaggcctag

SEQ ID NO: 555 - DNA, 1782 bp, Homo sapiens
  source 1..1782: mol_type = genomic DNA
atggccgctgcgtcctcatcggattccgacgcctgcggagctgagagcaatgaggccaattcgaagtggttggatgcgcactacgacccaatggccaatatccacaccttttctgcctgcctagcgctggcagatttacatggggatggggaatacaagctggtggtaggggaccttggccctggtgggcagcagccccgcctgaaggtgctcaaaggaccactggtgatgaccgaaagcccgctacctgctctgccagctgctgctgccaccttcctcatggagcaacatgagccccggaccccagctctggcacttgcttcaggcccttgtgtctatgtgtataagaatctcagaccctacttcaagttcagcctgccccaattgcctccaaatcctctggaacaagacctttggaaccaggccaaagaggaccgaatcgaccccttaaccctgaaggagatgctggagagcatccgggagacggcagaggagcctttgtccatccagtcactcaggtttctgcagctggagctaagtgaaatggaggcatttgtaaaccaacacaagtccaactccatcaagcggcagacagtcatcaccaccatgaccaccttgaagaagaacctggctgacgaggatgctgtgtcttgcctggtgctgggcaccgagaacaaggagctcctggtgcttgaccccgaggccttcaccattttagccaagatgagccttcccagcgtccccgtcttcctagaggtttctggccagtttgatgttgagttccggcttgccgcggcctgccgcaatggaaacatctatattctgagaagagactccaagcaccccaagtactgcatcgagctgagcgcccagcctgtgggacttatccgggtacacaaggtcctagtggtgggcagcacccaagacagcctgcatggcttcacccacaaggggaagaagctgtggacagtgcagatgcccgcagccatcctgaccatgaacctcctggagcagcattcccggggcctgcaggccgtcatggctgggctggccaatggagaggtccgcatttatcgtgacaaggccctgctcaatgtcatccacaccccggatgcagtgaccagcctttgctttggccggtacgggcgggaggacaacaccctcatcatgaccactcgaggtggtggcctgatcatcaagatcctgaagcgtacagcagtgtttgtagagggaggaagtgaggtgggtcccccaccagcccaggccatgaaactcaatgtgccccgaaagacccggctttacgtggatcagacactgcgagagcgggaggctggcaccgccatgcaccgggccttccagacagacctatacctgctgcgcctacgtgctgcccgcgcctacctgcaggccctcgagtccagcctgagccccctgtccacgacagcccgagagccactcaagctgcacgccgtggttcagggccttggccccacctttaagctcacacttcacctgcagaacacctcaacaacccgtcctgtcctggggctgctggtctgcttcctgtacaacgaggcgctctattccctgccccgggccttcttcaaggtacccttgctggtgccagggctcaactaccccctggagacctttgtggagagtctcagtaacaagggcatctcagacatcatcaaggtgctggtgcttcgagaaggccaaagtgcacccctgctgagtgcccacgtcaacatgcctgggagcgaggggctggcggccgcctga

SEQ ID NO: 556 - DNA, 828 bp, Homo sapiens
  source 1..828: mol_type = genomic DNA
atgaccacagagcaggcaagggggcagcagggcccaaatctggccattggccgtcagaagccccctgcgggggttgtgactcccaagagtgatgcagaggagcccccgttgaccaggaagaggagcaagaaggagagggggctccgagggtctcgaaagcgcactggcagctctggggagcagacaggccccgaggccccggggagcagcaataaccctcccagcactggagaggggccggcgggcgcaccccctgcatcccctgggccggcctcttctcgccagtcccaccgacatcgtcctgactccctgcacgacgctgctcagaggacatacgggcccctgctcaatcgagtcttcgggaaggaccgcgaactgggccccgaggagctagacgagcttcaggccgccttcgaggagtttgacactgaccgtgacggctacatcagccaccgggagctgggtgactgcatgcggaccctgggctacatgcccaccgagatggagctcctggaggtctcgcagcacatcaagatgcgcatgggcggccgtgtggactttgaggagtttgtagaactgataggcccaaagctgagggaggagacggcgcacatgctgggggtgcgagagctgcgcatcgccttccgagagtttgacagggacagggatggacgaattacggtggcggagctgcgggaggcggtaccggctctgctcggggagccgctggcgggtcctgagctggacgagatgctccgagaagtggacctcaatggggatggcaccgtagactttgacgagtttgtgatgatgctctcccgccactga

SEQ ID NO: 557 - DNA, 4848 bp, Homo sapiens
  source 1..4848: mol_type = genomic DNA
atggaggcagcgccgcccgggccgccgtggccgctgctgctgctgctgctgctgctgctggcgctgtgcggctgcccggcccccgccgcggcctcgccgctcctgctatttgccaaccgccgggacgtacggctggtggacgccggcggagtcaagctggagtccaccatcgtggtcagcggcctggaggatgcggccgcagtggacttccagttttccaagggagccgtgtactggacagacgtgagcgaggaggccatcaagcagacctacctgaaccagacgggggccgccgtgcagaacgtggtcatctccggcctggtctctcccgacggcctcgcctgcgactgggtgggcaagaagctgtactggacggactcagagaccaaccgcatcgaggtggccaacctcaatggcacatcccggaaggtgctcttctggcaggaccttgaccagccgagggccatcgccttggaccccgctcacgggtacatgtactggacagactggggtgagacgccccggattgagcgggcagggatggatggcagcacccggaagatcattgtggactcggacatttactggcccaatggactgaccatcgacctggaggagcagaagctctactgggctgacgccaagctcagcttcatccaccgtgccaacctggacggctcgttccggcagaaggtggtggagggcagcctgacgcaccccttcgccctgacgctctccggggacactctgtactggacagactggcagacccgctccatccatgcctgcaacaagcgcactggggggaagaggaaggagatcctgagtgccctctactcacccatggacatccaggtgctgagccaggagcggcagcctttcttccacactcgctgtgaggaggacaatggcggctgctcccacctgtgcctgctgtccccaagcgagcctttctacacatgcgcctgccccacgggtgtgcagctgcaggacaacggcaggacgtgtaaggcaggagccgaggaggtgctgctgctggcccggcggacggacctacggaggatctcgctggacacgccggacttcaccgacatcgtgctgcaggtggacgacatccggcacgccattgccatcgactacgacccgctagagggctatgtctactggacagatgacgaggtgcgggccatccgcagggcgtacctggacgggtctggggcgcagacgctggtcaacaccgagatcaacgaccccgatggcatcgcggtcgactgggtggcccgaaacctctactggaccgacacgggcacggaccgcatcgaggtgacgcgcctcaacggcacctcccgcaagatcctggtgtcggaggacctggacgagccccgagccatcgcactgcaccccgtgatgggcctcatgtactggacagactggggagagaaccctaaaatcgagtgtgccaacttggatgggcaggagcggcgtgtgctggtcaatgcctccctcgggtggcccaacggcctggccctggacctgcaggaggggaagctctactggggagacgccaagacagacaagatcgaggtgatcaatgttgatgggacgaagaggcggaccctcctggaggacaagctcccgcacatttttgggttcacgctgctgggggacttcatctactggactgactggcagcgccgcagcatcgagcgggtgcacaaggtcaaggccagccgggacgtcatcattgaccagctgcccgacctgatggggctcaaagctgtgaatgtggccaaggtcgtcggaaccaacccgtgtgcggacaggaacggggggtgcagccacctgtgcttcttcacaccccacgcaacccggtgtggctgccccatcggcctggagctgctgagtgacatgaagacctgcatcgtgcctgaggccttcttggtcttcaccagcagagccgccatccacaggatctccctcgagaccaataacaacgacgtggccatcccgctcacgggcgtcaaggaggcctcagccctggactttgatgtgtccaacaaccacatctactggacagacgtcagcctgaagaccatcagccgcgccttcatgaacgggagctcggtggagcacgtggtggagtttggccttgactaccccgagggcatggccgttgactggatgggcaagaacctctactgggccgacactgggaccaacagaatcgaagtggcgcggctggacgggcagttccggcaagtcctcgtgtggagggacttggacaacccgaggtcgctggccctggatcccaccaagggctacatctactggaccgagtggggcggcaagccgaggatcgtgcgggccttcatggacgggaccaactgcatgacgctggtggacaaggtgggccgggccaacgacctcaccattgactacgctgaccagcgcctctactggaccgacctggacaccaacatgatcgagtcgtccaacatgctgggtcaggagcgggtcgtgattgccgacgatctcccgcacccgttcggtctgacgcagtacagcgattatatctactggacagactggaatctgcacagcattgagcgggccgacaagactagcggccggaaccgcaccctcatccagggccacctggacttcgtgatggacatcctggtgttccactcctcccgccaggatggcctcaatgactgtatgcacaacaacgggcagtgtgggcagctgtgccttgccatccccggcggccaccgctgcggctgcgcctcacactacaccctggaccccagcagccgcaactgcagcccgcccaccaccttcttgctgttcagccagaaatctgccatcagtcggatgatcccggacgaccagcacagcccggatctcatcctgcccctgcatggactgaggaacgtcaaagccatcgactatgacccactggacaagttcatctactgggtggatgggcgccagaacatcaagcgagccaaggacgacgggacccagccctttgttttgacctctctgagccaaggccaaaacccagacaggcagccccacgacctcagcatcgacatctacagccggacactgttctggacgtgcgaggccaccaataccatcaacgtccacaggctgagcggggaagccatgggggtggtgctgcgtggggaccgcgacaagcccagggccatcgtcgtcaacgcggagcgagggtacctgtacttcaccaacatgcaggaccgggcagccaagatcgaacgcgcagccctggacggcaccgagcgcgaggtcctcttcaccaccggcctcatccgccctgtggccctggtggtggacaacacactgggcaagctgttctgggtggacgcggacctgaagcgcattgagagctgtgacctgtcaggggccaaccgcctgaccctggaggacgccaacatcgtgcagcctctgggcctgaccatccttggcaagcatctctactggatcgaccgccagcagcagatgatcgagcgtgtggagaagaccaccggggacaagcggactcgcatccagggccgtgtcgcccacctcactggcatccatgcagtggaggaagtcagcctggaggagttctcagcccacccatgtgcccgtgacaatggtggctgctcccacatctgtattgccaagggtgatgggacaccacggtgctcatgcccagtccacctcgtgctcctgcagaacctgctgacctgtggagagccgcccacctgctccccggaccagtttgcatgtgccacaggggagatcgactgtatccccggggcctggcgctgtgacggctttcccgagtgcgatgaccagagcgacgaggagggctgccccgtgtgctccgccgcccagttcccctgcgcgcggggtcagtgtgtggacctgcgcctgcgctgcgacggcgaggcagactgtcaggaccgctcagacgaggcggactgtgacgccatctgcctgcccaaccagttccggtgtgcgagcggccagtgtgtcctcatcaaacagcagtgcgactccttccccgactgtatcgacggctccgacgagctcatgtgtgaaatcaccaagccgccctcagacgacagcccggcccacagcagtgccatcgggcccgtcattggcatcatcctctctctcttcgtcatgggtggtgtctattttgtgtgccagcgcgtggtgtgccagcgctatgcgggggccaacgggcccttcccgcacgagtatgtcagcgggaccccgcacgtgcccctcaatttcatagccccgggcggttcccagcatggccccttcacaggcatcgcatgcggaaagtccatgatgagctccgtgagcctgatggggggccggggcggggtgcccctctacgaccggaaccacgtcacaggggcctcgtccagcagctcgtccagcacgaaggccacgctgtacccgccgatcctgaacccgccgccctccccggccacggacccctccctgtacaacatggacatgttctactcttcaaacattccggccactgcgagaccgtacaggccctacatcattcgaggaatggcgcccccgacgacgccctgcagcaccgacgtgtgtgacagcgactacagcgccagccgctggaaggccagcaagtactacctggatttgaactcggactcagacccctatccacccccacccacgccccacagccagtacctgtcggcggaggacagctgcccgccctcgcccgccaccgagaggagctacttccatctcttcccgccccctccgtccccctgcacggactcatcctga

SEQ ID NO: 558 - DNA, 1923 bp, Homo sapiens
  source 1..1923: mol_type = genomic DNA
atgttctcgtgtgtgaagccctatgaggaccagaactactcagccctgaggcgggactgccggcgcaggaaggtgctcttcgaggaccccctcttccccgccactgacgactcactctactataagggcacgccggggcccgccgtcaggtggaagcgacccaagggcatctgcgaggacccccgcctctttgtggatggcatcagctcccacgacctgcaccagggccaggtgggcaactgctggtttgtggcagcctgctcgtcacttgcctcccgggagtcgctgtggcaaaaggtcatcccagactggaaggagcaggaatgggaccccgaaaagcccaacgcctacgcgggcatcttccacttccacttctggcgcttcggggaatgggtggacgtggtcatcgatgaccggctgcccacagtcaacaaccagctcatctactgccactccaactcccgcaatgagttttggtgcgccctagtggagaaggcctatgccaaactggcaggctgttaccaggccctggatggaggcaacacagcagacgcactggtggacttcacgggtggtgtttctgagcccatcgacctgaccgagggtgactttgccaacgatgagactaagaggaaccagctctttgagcgcatgttaaaggtgcacagccggggcggcctcatcagtgcctccatcaaggcagtgacagcagctgacatggaggcccgcctggcgtgcggcctggtaaagggccacgcatacgccgtcactgatgtgcgcaaggtgcgcctgggccacggcctactggccttcttcaagtcagagaagttggacatgatccgcctgcgcaacccctggggcgagcgggagtggaacgggccctggagtgacacctcggaggagtggcagaaagtgagcaagagtgagcgggagaagatgggtgtgaccgtgcaggacgacggtgagttctggatgaccttcgaggacgtgtgccggtacttcacggacatcatcaagtgccgcgtgatcaacacatcccacctgagcatccacaagacgtgggaggaggcccggctgcatggcgcctggacgctgcatgaggacccgcgacagaaccgcggtggcggctgcatcaaccacaaggacaccttcttccagaacccacagtacatcttcgaagtcaagaagccagaagatgaagtcctgatctgcatccagcagcggccaaagcggtctacgcgccgggagggcaagggtgagaacctggccattggctttgacatctacaaggtggaggagaaccgccagtaccgcatgcacagcctgcagcacaaggccgccagctccatctacatcaactcacgcagcgtcttcctgcgcaccgaccagcccgagggccgctatgtcatcatccccacaaccttcgagccaggccacactggcgagttcctgctccgagtcttcactgatgtgccctccaactgccgggagctgcgcctggatgagcccccacacacctgctggagctccctctgtggctacccccagctggtgacccaggtacatgtcctgggagctgctggcctcaaggactccccaacaggggctaactcttatgtgatcatcaagtgtgagggagacaaagtccgctcggctgtgcagaagggcacctccacaccagagtacaatgtgaaaggcatcttctaccgcaagaagctgagccagcccatcactgtacaggtctggaaccaccgagtgctgaaggatgaatttctgggccaggtgcacctaaaggctgacccggacaacctccaggccctgcataccctccacctccgggaccgaaatagccggcagcccagcaacctgccaggcactgtggccgtgcacattctcagcagcacctccctcatggctgtctga

SEQ ID NO: 559 - DNA, 6648 bp, Homo sapiens
  source 1..6648: mol_type = genomic DNA
atggtgattcttcagcagggggaccatgtgtggatggacctgagattggggcaggagttcgacgtgcccatcggggcggtggtgaagctctgcgactctgggcaggtccaggtggtggatgatgaagacaatgaacactggatctctccgcagaacgcaacgcacatcaagcctatgcaccccacgtcggtccacggcgtggaggacatgatccgcctgggggacctcaacgaggcgggcatcttgcgcaacctgcttatccgctaccgggaccacctcatctacacgtatacgggctccatcctggtggctgtgaacccctaccagctgctctccatctactcgccagagcacatccgccagtataccaacaagaagattggggagatgcccccccacatctttgccattgctgacaactgctacttcaacatgaaacgcaacagccgagaccagtgctgcatcatcagtggggaatctggggccgggaagacggagagcacaaagctgatcctgcagttcctggcagccatcagtgggcagcactcgtggattgagcagcaggtcttggaggccacccccattctggaagcatttgggaatgccaagaccatccgcaatgacaactcaagccgtttcggaaagtacatcgacatccacttcaacaagcggggcgccatcgagggcgcgaagattgagcagtacctgctggaaaagtcacgtgtctgtcgccaggccctggatgaaaggaactaccacgtgttctactgcatgctggagggtatgagtgaggatcagaagaagaagctgggcttgggccaggcctctgactacaactacttggccatgggtaactgcataacctgtgagggccgggtggacagccaggagtacgccaacatccgctccgccatgaaggtgctcatgttcactgacaccgagaactgggagatctcgaagctcctggctgccatcctgcacctgggcaacctgcagtatgaggcacgcacatttgaaaacctggatgcctgtgaggttctcttctccccatcgctggccacagctgcatccctgcttgaggtgaaccccccagacctgatgagctgcctgactagccgcaccctcatcacccgcggggagacggtgtccaccccactgagcagggaacaggcactggacgtgcgcgacgccttcgtaaaggggatctacgggcggctgttcgtgtggattgtggacaagatcaacgcagcaatttacaagcctccctcccaggatgtgaagaactctcgcaggtccatcggcctcctggacatctttgggtttgagaactttgctgtgaacagctttgagcagctctgcatcaacttcgccaatgagcacctgcagcagttctttgtgcggcacgtgttcaagctggagcaggaggaatatgacctggagagcattgactggctgcacatcgagttcactgacaaccaggatgccctggacatgattgccaacaagcccatgaacatcatctccctcatcgatgaggagagcaagttccccaagggcacagacaccaccatgttacacaagctgaactcccagcacaagctcaacgccaactacatcccccccaagaacaaccatgagacccagtttggcatcaaccattttgcaggcatcgtctactatgagacccaaggcttcctggagaagaaccgagacaccctgcatggggacattatccagctggtccactcctccaggaacaagttcatcaagcagatcttccaggccgatgtcgccatgggcgccgagaccaggaagcgctcgcccacacttagcagccagttcaagcggtcactggagctgctgatgcgcacgctgggtgcctgccagcccttctttgtgcgatgcatcaagcccaatgagttcaagaagcccatgctgttcgaccggcacctgtgcgtgcgccagctgcggtactcaggaatgatggagaccatccgaatccgccgagctggctaccccatccgctacagcttcgtagagtttgtggagcggtaccgtgtgctgctgccaggtgtgaagccggcctacaagcagggcgacctccgcgggacttgccagcgcatggctgaggctgtgctgggcacccacgatgactggcagataggcaaaaccaagatctttctgaaggaccaccatgacatgctgctggaagtggagcgggacaaagccatcaccgacagagtcatcctccttcagaaagtcatccggggattcaaagacaggtctaactttctgaagctgaagaacgctgccacactgatccagaggcactggcggggtcacaactgtaggaagaactacgggctgatgcgtctgggcttcctgcggctgcaggccctgcaccgctcccggaagctgcaccagcagtaccgcctggcccgccagcgcatcatccagttccaggcccgctgccgcgcctatctggtgcgcaaggccttccgccaccgcctctgggctgtgctcaccgtgcaggcctatgcccggggcatgatcgcccgcaggctgcaccaacgcctcagggctgagtatctgtggcgcctcgaggctgagaaaatgcggctggcggaggaagagaagcttcggaaggagatgagcgccaagaaggccaaggaggaggccgagcgcaagcatcaggagcgcctggcccagctggctcgtgaggacgctgagcgggagctgaaggagaaggaggccgctcggcggaagaaggagctcctggagcagatggaaagggcccgccatgagcctgtcaatcactcagacatggtggacaagatgtttggcttcctggggacttcaggtggcctgccaggccaggagggccaggcacctagtggctttgaggacctggagcgagggcggagggagatggtggaggaggacctggatgcagccctgcccctgcctgacgaggatgaggaggacctctctgagtataaatttgccaagttcgcggccacctacttccaggggacaaccacgcactcctacacccggcggccactcaaacagccactgctctaccatgacgacgagggtgaccagctggcagccctggcggtctggatcaccatcctccgcttcatgggggacctccctgagcccaagtaccacacagccatgagtgatggcagtgagaagatccctgtgatgaccaagatttatgagaccctgggcaagaagacgtacaagagggagctgcaggccctgcagggcgagggcgaggcccagctccccgagggccagaagaagagcagtgtgaggcacaagctggtgcatttgactctgaaaaagaagtccaagctcacagaggaggtgaccaagaggctgcatgacggggagtccacagtgcagggcaacagcatgctggaggaccggcccacctccaacctggagaagctgcacttcatcatcggcaatggcatcctgcggccagcactccgggacgagatctactgccagatcagcaagcagctgacccacaacccctccaagagcagctatgcccggggctggattctcgtgtctctctgcgtgggctgtttcgccccctccgagaagtttgtcaagtacctgcggaacttcatccacgggggcccgcccggctacgccccgtactgtgaggagcgcctgagaaggacctttgtcaatgggacacggacacagccgcccagctggctggagctgcaggccaccaagtccaagaagccaatcatgttgcccgtgacattcatggatgggaccaccaagaccctgctgacggactcggcaaccacggccaaggagctctgcaacgcgctggccgacaagatctctctcaaggaccggttcgggttctccctctacattgccctgtttgacaaggtgtcctccctgggcagcggcagtgaccacgtcatggacgccatctcccagtgcgagcagtacgccaaggagcagggcgcccaggagcgcaacgccccctggaggctcttcttccgcaaagaggtcttcacgccctggcacagcccctccgaggacaacgtggccaccaacctcatctaccagcaggtggtgcgaggagtcaagtttggggagtacaggtgtgagaaggaggacgacctggctgagctggcctcccagcagtactttgtagactatggctctgagatgatcctggagcgcctcctgaacctcgtgcccacctacatccccgaccgcgagatcacgcccctgaagacgctggagaagtgggcccagctggccatcgccgcccacaagaaggggatttatgcccagaggagaactgatgcccagaaggtcaaagaggatgtggtcagttatgcccgcttcaagtggcccttgctcttctccaggttttatgaagcctacaaattctcaggccccagtctccccaagaacgacgtcatcgtggccgtcaactggacgggtgtgtactttgtggatgagcaggagcaggtacttctggagctgtccttcccagagatcatggccgtgtccagcagcagggagtgccgtgtctggctctcactgggctgctctgatcttggctgtgctgcgcctcactcaggctgggcaggactgaccccggcggggccctgttctccgtgttggtcctgcaggggagcgaaaacgacggcccccagcttcacgctggccaccatcaagggggacgaatacaccttcacctccagcaatgctgaggacattcgtgacctggtggtcaccttcctagaggggctccggaagagatctaagtatgttgtggccctgcaggataaccccaaccccgcaggcgaggagtcaggcttcctcagctttgccaagggagacctcatcatcctggaccatgacacgggcgagcaggtcatgaactcgggctgggccaacggcatcaatgagaggaccaagcagcgtggggacttccccaccgacagtgtgtacgtcatgcccactgtcaccatgccaccgcgggagattgtggccctggtcaccatgactcccgatcagaggcaggacgttgtccggctcttgcagctgcgaacggcggagcccgaggtgcgtgccaagccctacacgctggaggagttttcctatgactacttcaggcccccacccaagcacacgctgagccgtgtcatggtgtccaaggcccgaggcaaggaccggctgtggagccacacgcgggaaccgctcaagcaggcgctgctcaagaagctcctgggcagtgaggagctctcgcaggaggcctgcctggccttcattgctgtgctcaagtacatgggcgactacccgtccaagaggacacgctccgtcaacgagctcaccgaccagatctttgagggtcccctgaaagccgagcccctgaaggacgaggcatatgtgcagatcctgaagcagctgaccgacaaccacatcaggtacagcgaggagcggggttgggagctgctctggctgtgcacgggccttttcccacccagcaacatcctcctgccccacgtgcagcgcttcctgcagtcccgaaagcactgcccactcgccatcgactgcctgcaacggctccagaaagccctgagaaacgggtcccggaagtaccctccgcacctggtggaggtggaggccatccagcacaagaccacccagattttccacaaagtctacttccctgatgacactgacgaggccttcgaagtggagtccagcaccaaggccaaggacttctgccagaacatcgccaccaggctgctcctcaagtcctcagagggattcagcctctttgtcaaaattgcagacaaggtcctcagcgttcctgagaatgacttcttctttgactttgttcgacacttgacagactggataaagaaagctcggcccatcaaggacggaattgtgccctcactcacctaccaggtgttcttcatgaagaagctgtggaccaccacggtgccagggaaggatcccatggccgattccatcttccactattaccaggagttgcccaagtatctccgaggctaccacaagtgcacgcgggaggaggtgctgcagctgggggcgctgatctacagggtcaagttcgaggaggacaagtcctacttccccagcatccccaagctgctgcgggagctggtgccccaggaccttatccggcaggtctcacctgatgactggaagcggtccatcgtcgcctacttcaacaagcacgcagggaagtccaaggaggaggccaagctggccttcctgaagctcatcttcaagtggcccacctttggctcagccttcttcgaggtgaagcaaactacggagccaaacttccctgagatcctcctaattgccatcaacaagtatggggtcagcctcatcgatcccaaaacgaaggatatcctcaccactcatcccttcaccaagatctccaactggagcagcggcaacacctacttccacatcaccattgggaacttggtgcgcgggagcaaactgctctgcgagacgtcactgggctacaagatggatgacctcctgacttcctacattagccagatgctcacagccatgagcaaacagcggggctccaggagcggcaagtga

SEQ ID NO: 560 - DNA, 588 bp, Homo sapiens
  source 1..588: mol_type = genomic DNA
atggaaaatcataaatccaataataaggaaaacataacaattgttgatatatccagaaaaattaaccagcttccagaagcagaaaggaatctacttgaaaatggatcggtttatgttggattaaatgctgctctttgtggcctcatagcaaacagtctttttcgacgcatcttgaatgtgacaaaggctcgcatagctgctggcttaccaatggcagggataccttttcttacaacagacttaacttacagatgttttgtaagttttcctttgaatacaggtgatttggattgtgaaacctgtaccataacacggagtggactgactggtcttgttattggtggtctataccctgttttcttggctatacctgtaaatggtggtctagcagccaggtatcaatcagctctgttaccacacaaagggaacatcttaagttactggattagaacttctaagcctgtctttagaaagatgttatttcctattttgctccagactatgttttcagcataccttgggtctgaacaatataaactacttataaaggcccttcagttatctgaacctggcaaagaaattcactga

SEQ ID NO: 561 - DNA, 1614 bp, Homo sapiens
  source 1..1614: mol_type = genomic DNA
atggcctggcggggcgcagggccgagcgtcccgggggcgcccgggggcgtcggtctcagtctggggttgctcctgcagttgctgctgctcctggggccggcgcggggcttcggggacgaggaagagcggcgctgcgaccccatccgcatctccatgtgccagaacctcggctacaacgtgaccaagatgcccaacctggttgggcacgagctgcagacggacgccgagctgcagctgacaactttcacaccgctcatccagtacggctgctccagccagctgcagttcttcctttgttctgtttatgtgccaatgtgcacagagaagatcaacatccccattggcccatgcggcggcatgtgtctttcagtcaagagacgctgtgaacccgtcctgaaggaatttggatttgcctggccagagagtctgaactgcagcaaattcccaccacagaacgaccacaaccacatgtgcatggaagggccaggtgatgaagaggtgcccttacctcacaaaacccccatccagcctggggaagagtgtcactctgtgggaaccaattctgatcagtacatctgggtgaaaaggagcctgaactgtgtgctcaagtgtggctatgatgctggcttatacagccgctcagccaaggagttcactgatatctggatggctgtgtgggccagcctgtgtttcatctccactgccttcacagtactgaccttcctgatcgattcttctaggttttcctaccctgagcgccccatcatatttctcagtatgtgctataatatttatagcattgcttatattgtcaggctgactgtaggccgggaaaggatatcctgtgattttgaagaggcagcagaacctgttctcatccaagaaggacttaagaacacaggatgtgcaataattttcttgctgatgtacttttttggaatggccagctccatttggtgggttattctgacactcacttggtttttggcagcaggactcaaatggggtcatgaagccattgaaatgcacagctcttatttccacattgcagcctgggccatccccgcagtgaaaaccattgtcatcttgattatgagactggtggatgcagatgaactgactggcttgtgctatgttggaaaccaaaatctcgatgccctcaccgggttcgtggtggctcccctctttacttatttggtcattggaactttgttcattgctgcaggtttggtggccttgttcaaaattcggtcaaatcttcaaaaggatgggacaaagacagacaagttagaaagactgatggtcaagattggggtgttctcagtactgtacacagttcctgcaacgtgtgtgattgcctgttatttttatgaaatctccaactgggcactttttcggtattctgcagatgattccaacatggctgttgaaatgttgaaaatttttatgtctttgttggtgggcatcacttcaggcatgtggatttggtctgccaaaactcttcacacgtggcagaagtgttccaacagattggtgaattctggaaaggtaaagagagagaagagaggaaatggttgggtgaagcctggaaaaggcagtgagactgtggtataa

SEQ ID NO: 562 - DNA, 1056 bp, Homo sapiens
  source 1..1056: mol_type = genomic DNA
atgcccagtgaaactctctgggaaattgcaaaagctgaagtggaaaaaaggggaattaatggaagtgaaggtgatggagctgaaattgcagaaaaatttgttttcttcattggcagtaaaaatgggggaaagactactattattctaaggtgtcttgacagagatgaaccaccaaaaccaaccttagctttggaatatacatatggaagaagagcaaaagggcacaacacaccaaaagatatcgctcacttttgggaactcggtggaggaacctctttattggacttaatcagcatacccatcacaggtgacaccttacggacgttttctcttgttctcgttctggatctttcaaaacctaatgatctctggcccaccatggaaaatctcttgcaagccacaaaaagccatgtagacaaagtgataatgaaactgggaaagacaaatgctaaagcagtttctgaaatgagacagaagatctggaataatatgccgaaggatcatcctgatcatgaattaattgacccatttccggtacctctggtcataattggaagtaaatatgatgtttttcaggattttgagtctgagaagagaaaggtaatatgcaagacacttcgatttgttgcacattattatggagcatcattaatgtttaccagtaaatcagaagctctattactaaaaatacgtggagttatcaaccagttggcatttggcattgacaaaagcaaatcaatatgtgtggatcagaataaaccgctgtttatcacagcaggattggattctttcggtcaaataggatctcctcctgttcctgaaaatgacattggaaagcttcatgcccactcacctatggagttgtggaaaaaagtgtatgaaaagctctttccaccaaagagtattaacacgctgaaagatatcaaggaccctgcgagagatcctcagtatgctgaaaatgaagtcgatgagatgagaattcagaaggatctggaactggaacagtacaaaagaagttcttccaagtcttggaaacaaatcgagcttgattcttga

SEQ ID NO: 563 - DNA, 4383 bp, Homo sapiens
  source 1..4383: mol_type = genomic DNA
atggctggacgacccctccgcataggagatcagctggttctggaagaagattatgatgagacctacattcctagtgagcaagaaattcttgaatttgcccgggagattggtattgatcccatcaaggaaccagaactgatgtggctggcgcgagagggcatcgtggccccactgcctggagagtggaaaccatgccaggacatcacaggtgacatttactatttcaacttcgccaacgggcagtctatgtgggaccatccatgtgacgaacactatcggagcttggtgatccaagagcgggcaaagctgtcaacttctggggccattaagaagaagaaaaaaaaaaaggaaaagaaagacaagaaggacagagacccccccaaaagttcgctggccttgggttcctcattagccccagttcatgttcctcttgggggcctggctcctttacgaggtcttgtggataccccaccctctgctcttcgtggatctcaaagcgtgagcctggggagctcagtggagtctggacgtcagcttggagaactcatgctgccttcacagggtctcaagacctctgcttatacaaagggtctcttgggctccatatatgaggacaagactgctctcagcctcttgggtttaggagaagaaaccaatgaggaggatgaggaggaaagtgacaaccagagtgtccacagctcaagtgagcctcttaggaacctacacctggacattggggcactggggggtgactttgagtatgaggagtctctgagaacaagccagccagaggagaagaaggatgtttctctggattcagatgctgccggtccccctactccctgcaagccctccagcccaggtgcagacagcagtctgagcagtgctgttggcaaagggcgacagggaagtggagcaagacctggtcttccagaaaaagaggaaaatgagaagagtgaacctaagatttgcaggaatctggtgacccccaaggcagaccctacaggcagtgagcctgccaaagcctctgaaaaggaagcaccagaggacacagtagatgcaggagaggagggttccaggagggaagaggcagccaaggagccaaagaagaaggcttctgctctggaagagggcagttcagacgccagccaagaactggaaattagtgaacacatgaaggaaccacagctctcagactccatagcttctgaccccaagtccttccatggcctggacttcggttttcgcagccggatctcggagcacctgctggatgttgatgtgctttccccagtcctgggtggagcttgtcggcaggcccagcaaccactgggaatagaagacaaggatgacagccagtccagccaagatgagctgcagagcaagcagtccaaaggcctggaggagaggttatctcctccacttccacacgaggagcgggcccagagtccccctcgcagcctggccactgaagaagagcctccccagggccccgaggggcagcccgagtggaaggaggcagaggagcttggggaggactctgcagccagcctcagcctgcagctgtccctccagagggagcaggccccaagcccacctgctgcctgtgagaagggcaaggagcagcattcccaggccgaggagctgggccctgggcaggaagaggcagaggatcctgaggagaaggtggcggtcagccccaccccgccagtctctccagaggtgcgatccacagagcctgtggctcccccagagcagctctcagaggctgcactaaaggccatggaagaggcagtggcccaagtactcgagcaagaccagaggcacctgctggaatccaagcaagagaagatgcagcaactgcgggagaagctgtgccaagaggaggaagaggagatcctccggcttcaccagcagaaagagcaatctctcagttccttgagggagcggctgcagaaagccattgaggaggaggaggcccggatgagagaggaggaaagccagaggctatcctggctccgagctcaggtccagtccagcacacaagcagatgaggaccaaatcagggctgagcaagaggcttccctgcagaaactgagagaagagttggagtctcaacagaaggctgagagggccagcttggaacagaaaaataggcaaatgctggagcagctcaaggaagagatagaggcttcggagaagagcgagcaggctgccctgaatgctgcaaaggagaaggctctgcagcagctgagggagcagctggaaggggagaggaaagaagctgtggcaacgctggagaaggagcacagtgctgagctggagcggctctgctcctcattggaggccaagcaccgggaggtggtctccagcctccagaagaagatacaggaagctcaacagaaagaggaggcccagctgcagaagtgccttgggcaagtggagcacagagttcaccagaagtcttatcacgtggctgggtatgagcacgagctcagcagtctcctgcgagagaagcgccaggaagtggaaggggagcatgagaggaggttggacaagatgaaggaggagcaccagcaagtgatggctaaggccagagagcagtatgaagctgaggagaggaagcagcgggctgagcttctggggcacctgaccggagagctggagcgcctgcagagggcccatgaacgagaactggagactgtgaggcaggagcaacacaagcgtcttgaggacttgcggcgccggcacagggagcaggaaaggaagctccaggatttagagttggaccttgaaaccagagctaaagatgtcaaggccagattggctctgctggaggtccaggaggagaccgcccggagggagaagcagcagctgcttgatgtgcagaggcaggttgctctgaagagtgaggaagccacagccacccatcagcagctggaggaggcacagaaggagcacacccacctgttgcagtcaaaccagcagctccgagaaattcttgatgagctgcaggcccgcaagctgaagctggagtcccaagtggatctgctgcaggctcagagccagcaactgcagaaacacttcagcagcctggaggctgaagctcaaaagaagcagcacctgttgagagaagtgacagttgaggaaaataatgcttccccacattttgagccagatctccatattgaggacctgaggaaatcccttggaacaaaccagaccaaagaggtgtcttcttctctctcccagagcaaggaggacttatacttggacagcctgtcctcccacaatgtctggcacctcctctctgctgagggggtagccctccgtagtgccaaggagttccttgtgcagcagacacgctccatgcggaggcggcagacagctctgaaagctgcccagcagcattggcgccatgagctggccagtgcgcaggaggtggccaaagacccaccaggcatcaaggccctggaagatatgcgcaagaacctggagaaggagaccaggcacctggatgagatgaagtcggccatgcggaaaggccacaacctgctgaagaagaaagaggagaagctgaatcagttggagtcctctctttgggaagaggcctcagatgagggcactctgggaggatcccccaccaagaaggcagtaaccttcgacctcagtgacatggacagcctgagcagtgaaagttctgaatctttttccccgcctcaccgtgagtggtggcggcagcagaggatcgactcaaccccgagtctcacctcccgcaagatccacgggcttagccactccctccggcagatcagcagccagctgagcagtgtcctcagcatcctggacagcctcaaccctcagtcgccgccgccgctcctcgcctccatgccagcccagctccctccccgggaccctaagagcacccccacccccacctactatggctccctggccaggttctcagccttatcatctgctacacccacgtccacccaatgggcctgggattcagggcaggggcccaggctcccctcctctgtggctcaaacggtggacgacttcctgttggagaagtggcgcaagtattttccatctggcatcccgctgctcagcaacagccccaccccgctggagagcaggctgggttacatgtctgccagtgagcagctccggctcctacagcactcccattcgcaagtccctgaggcgggcagcaccacctttcagggcataattgaggccaaccggaggtggctggaacgtgtcaagaatgaccccaggttacctctcttctcgtcaacacccaagccaaaagctactttgagcctcctgcagctgggccttgatgagcacaacagagtgaaggtgtatcgcttctga

SEQ ID NO: 564 - DNA, 732 bp, Homo sapiens
  source 1..732: mol_type = genomic DNA
atgaggccactcctcgtcctgctgctcctgggcctggcggccggctcgcccccactggacgacaacaagatccccagcctctgcccggggcaccccggccttccaggcacgccgggccaccatggcagccagggcttgccgggccgcgatggccgcgacggccgcgacggcgcgcccggggctccgggagagaaaggcgagggcgggaggccgggactgccgggacctcgaggggaccccgggccgcgaggagaggcgggacccgcggggcccaccgggcctgccggggagtgctcggtgcctccgcgatccgccttcagcgccaagcgctccgagagccgggtgcctccgccgtctgacgcacccttgcccttcgaccgcgtgctggtgaacgagcagggacattacgacgccgtcaccggcaagttcacctgccaggtgcctggggtctactacttcgccgtccatgccaccgtctaccgggccagcctgcagtttgatctggtgaagaatggcgaatccattgcctctttcttccagtttttcggggggtggcccaagccagcctcgctctcggggggggccatggtgaggctggagcctgaggaccaagtgtgggtgcaggtgggtgtgggtgactacattggcatctatgccagcatcaagacagacagcaccttctccggatttctggtgtactccgactggcacagctccccagtctttgcttag

SEQ ID NO: 565 - DNA, 1740 bp, Homo sapiens
  source 1..1740: mol_type = genomic DNA
atgaaggacttctcagatgtcatcctctgcatggaggcaacagaatcgagcaagaccgagttctgcaatcctgccttcgagcctgagtctgggccaccctgccctcccccagttttcccagaggatgccagctacagcgtcccagctccctggcatggtcggcgtcctcgagggctacggccagactgccgcttctcctggctctgtgtcctcctgctctccagcctgctcctcctgctgcttgggctgctggtggccatcatcctggcccagctgcaggctgcacccccatctggggcgtcccatagcccactgcctgccggaggccttaccacgaccaccaccacccccaccatcaccacctctcaggcagctgggacccctaaagggcagcaggagtcaggcgtgagcccctccccacagtccacctgtggaggcctcctctctggcccaaggggcttcttcagcagccctaactacccagacccttacccccccaacacccactgcgtgtggcatatccaggtggccacagaccatgcaatacagctcaagatcgaagccctcagcatagagagtgtggcctcttgcctttttgatcgcttggaactctcccctgagcctgaaggccccctcctcagggtttgtggaagggtgcctccccccacgctcaacaccaatgccagccacctcctggtggtcttcgtctctgacagcagtgtggaaggatttggtttccatgcctggtaccaggctatggcccctgggcgcgggagctgtgcccatgatgagttccgctgtgaccagctcatctgcctgctacctgactcagtgtgtgatggttttgccaactgtgctgacggcagtgatgagaccaattgcagtgccaagttctcggggtgtggggggaatctgactggcctccagggcactttctctactcccagctacctgcagcagtaccctcaccaactgctctgcacctggcatatctcggtgcctgccggacacagcatagaactacagttccacaacttcagcctggaggctcaggacgagtgcaagtttgactacgtggaggtgtatgagaccagcagctcaggggccttcagcctcctgggcaggttctgtggagcagagccacccccccacctcgtctcctcgcaccatgagctggctgtgctgtttaggacagatcatggcatcagcagtggaggcttctcagccacctacctggccttcaatgccacggagaacccctgtgggcccagtgagctctcctgccaggcaggagggtgtaagggtgtgcagtggatgtgtgacatgtggagagactgcaccgatggcagcgatgacaactgcagcggccccttgttcccacccccagagctggcctgtgagcctgtccaggtggagatgtgcctcggtctgagctacaacaccacagccttccctaacatctgggtgggcatgatcacccaggaggaggtggtagaggtcctcagcggttacaagagcctgacaagcctgccctgctaccagcatttccggaggctcctgtgtgggctgcttgtgccccgttgcaccccactaggcagtgttctgcccccttgccgctctgtctgccaggaagcggagcaccagtgccagtctggcctggcactactgggcaccccctggcccttcaactgcaacaggctgccagaggcagctgacctggaagcttgtgcccagccctga

SEQ ID NO: 566 - DNA, 3414 bp, Homo sapiens
  source 1..3414: mol_type = genomic DNA
atggtctgtggctgctctgccctccttcccctccccaaccccaggcccaccatgcctgcaactcccaacttcctcgcaaaccccagctccagcagccgctggattcccctccagccaatgcccgtggcctgggcctttgtgcagaagacctcggccctcctgtggctgctgcttctaggcacctccctgtcccctgcgtggggacaggccaagattcctctggaaacagtgaagctatgggctgacaccttcggcggggacctgtataacactgtgaccaaatactcaggctctctcttgctgcagaagaagtacaaggatgtggagtccagtctgaagatcgaggaggtggatggcttggagctggtgaggaagttctcagaggacatggagaacatgctgcggaggaaagtcgaggcggtccagaatctggtggaagctgccgaggaggccgacctgaaccacgaattcaatgaatccctggtgttcgactattacaactcggtcctgatcaacgagagggacgagaagggcaacttcgtggagctgggcgccgagttcctcctggagtccaatgctcacttcagcaacctgccggtgaacacctccatcagcagcgtgcagctgcccaccaacgtgtacaacaaagacccagatattttaaatggagtctacatgtctgaagccttgaatgctgtcttcgtggagaacttccagagagacccaacgttgacctggcaatattttggcagtgcaactggattcttcaggatctatccaggtataaaatggacacctgatgagaatggagtcattacttttgactgccgaaaccgcggctggtacattcaagctgctacttctcccaaggacatagtgattttggtggacgtgagcggcagtatgaaggggctgaggatgactattgccaagcacaccatcaccaccatcttggacaccctgggggagaatgacttcattaatatcatagcgtacaatgactacgtccattacatcgagccttgttttaaagggatcctcgtccaggcggaccgagacaatcgagagcatttcaaactgctggtggaggagttgatggtcaaaggtgtgggggtcgtggaccaagccctgagagaagccttccagatcctgaagcagttccaagaggccaagcaaggaagcctctgcaaccaggccatcatgctcatcagcgacggcgccgtggaggactacgagccggtgtttgagaagtataactggccagactgtaaggtccgagttttcacttacctcattgggagagaagtgtcttttgctgaccgcatgaagtggattgcatgcaacaacaaaggctactacacgcagatctcaacgctggcggacacccaggagaacgtgatggaatacctgcacgtgctcagccgccccatggtcatcaaccacgaccacgacatcatctggacagaggcctacatggacagcaagctcctcagctcgcaggctcagagcctgacactgctcaccactgtggccatgccagtcttcagcaagaagaacgaaacgcgatcccatggcattctcctgggtgtggtgggctcagatgtggccctgagagagctgatgaagctggcgccccggtacaagcttggagtgcacggatacgcctttctgaacaccaacaatggctacatcctctcccatcccgacctccggcccctgtacagagaggggaagaaactaaaacccaaacctaactacaacagtgtggatctctccgaagtggagtgggaagaccaggctgaatctctgagaacagccatgatcaatagggaaacaggtactctctcgatggatgtgaaggttccgatggataaagggaagcgagttcttttcctgaccaatgactacttcttcacggacatcagcgacacccctttcagtttgggggtggtgctgtcccggggccacggagaatacatccttctggggaacacgtctgtggaagaaggcctgcatgacttgcttcacccagacctggccctggccggtgactggatctactgcatcacagatattgacccagaccaccggaagctcagccagctagaggccatgatccgcttcctcaccaggaaggacccagacctggagtgtgacgaggagctggtccgggaggtgctgtttgacgcggtggtgacagcccccatggaagcctactggacagcgctggccctcaacatgtccgaggagtctgaacacgtggtggacatggccttcctgggcacccgggctggcctcctgagaagcagcttgttcgtgggctccgagaaggtctccgacaggaagttcctgacacctgaggacgaggccagcgtgttcaccctggaccgcttcccgctgtggtaccgccaggcctcagagcatcctgctggcagcttcgtcttcaacctccgctgggcagaaggaccagaaagtgcgggtgaacccatggtggtgacggcaagcacagctgtggcggtgaccgtggacaagaggacagccattgctgcagccgcgggcgtccaaatgaagctggaattcctccagcgcaaattctgggcggcaacgcggcagtgcagcactgtggatgggccgtgcacacagagctgcgaggacagtgatctggactgcttcgtcatcgacaacaacgggttcattctgatctccaagaggtcccgagagacgggaagatttctgggggaggtggatggtgctgtcctgacccagctgctcagcatgggggtgttcagccaagtgactatgtatgactatcaggccatgtgcaaaccctcgagtcaccaccacagtgcagcccagcccctggtcagcccaatttctgccttcttgacggcgaccaggtggctgctgcaggagctggtgctgttcctgctggagtggagtgtctggggctcctggtacgacagaggggccgaggccaaaagtgtcttccatcactcccacaaacacaagaagcaggacccgctgcagccctgcgacacggagtaccccgtgttcgtgtaccagccggccatccgggaggccaacgggatcgtggagtgcgggccctgccagaaggtatttgtggtgcagcagattcccaacagtaacctcctcctcctggtgacagaccccacctgtgactgcagcatcttcccaccagtgctgcaggaggcgacagaagtcaaatataatgcctctgtcaaatgtgaccggatgcgctcccagaagctccgccggcgaccagactcctgccacgccttccatccagaggagaatgcccaggactgcggcggcgcctcggacacctcagcctcgccgcccctactcctgctgcctgtgtgtgcctgggggctactgccccaactcctgcggtga

SEQ ID NO: 567 - DNA, 1023 bp, Homo sapiens
  source 1..1023: mol_type = genomic DNA
atgggggagatggagcaactgcgtcaggaagcggagcagctcaagaagcagattgcagatgccaggaaagcctgtgctgacgttactctggcagagctggtgtctggcctagaggtggtgggacgagtccagatgcggacgcggcggacgttaaggggacacctggccaagatttacgccatgcactgggccactgattctaagctgctggtaagtgcctcgcaagatgggaagctgatcgtgtgggacagctacaccaccaacaaggtgcacgccatcccactgcgctcctcctgggtcatgacctgtgcctatgccccatcagggaactttgtggcatgtggggggctggacaacatgtgttccatctacaacctcaaatcccgtgagggcaatgtcaaggtcagccgggagctttctgctcacacaggttatctctcctgctgccgcttcctggatgacaacaatattgtgaccagctcgggggacaccacgtgtgccttgtgggacattgagactgggcagcagaagactgtatttgtgggacacacgggtgactgcatgagcctggctgtgtctcctgacttcaatctcttcatttcgggggcctgtgatgccagtgccaagctctgggatgtgcgagaggggacctgccgtcagactttcactggccacgagtcggacatcaacgccatctgtttcttccccaatggagaggccatctgcacgggctcggatgacgcttcctgccgcttgtttgacctgcgggcagaccaggagctgatctgcttctcccacgagagcatcatctgcggcatcacgtccgtggccttctccctcagtggccgcctactattcgctggctacgacgacttcaactgcaatgtctgggactccatgaagtctgagcgtgtgggcatcctctctggccacgataacagggtgagctgcctgggagtcacagctgacgggatggctgtggccacaggttcctgggacagcttcctcaaaatctggaactga

SEQ ID NO: 568 - DNA, 252 bp, Homo sapiens
  source 1..252: mol_type = genomic DNA
atgagtgacaacactactctgcctgctccagcttcaaaccagggtcctaccaccccacgcaaaggccctcccaagttcaagcagaggcagactcgccaattcaagagtaaacctccaaagaaaggtgtgaaaggatttggagatgacattccaggaatggaggggctaggaacagatatcacagtgatttgtccatgggaggcattcagccacctggaattgcatgagctcgctcagtttgggattatctga

SEQ ID NO: 569 - DNA, 4464 bp, Homo sapiens
  source 1..4464: mol_type = genomic DNA
atgattcgcctcggggctccccagacgctggtgctgctgacgctgctcgtcgccgctgtccttcggtgtcagggccaggatgtccaggaggctggcagctgtgtgcaggatgggcagaggtataatgataaggatgtgtggaagccggagccctgccggatctgtgtctgtgacactgggactgtcctctgcgacgacataatctgtgaagacgtgaaagactgcctcagccctgagatccccttcggagagtgctgccccatctgcccaactgacctcgccactgccagtgggcaaccaggaccaaagggacagaaaggagaacctggagacatcaaggatattgtaggacccaaaggacctcctgggcctcagggacctgcaggggaacaaggacccagaggggatcgtggtgacaaaggtgaaaaaggtgcccctggacctcgtggcagagatggagaacctgggacccctggaaatcctggcccccctggtcctcccggcccccctggtccccctggtcttggtggaaactttgctgcccagatggctggaggatttgatgaaaaggctggtggcgcccagttgggagtaatgcaaggaccaatgggccccatgggacctcgaggacctccaggccctgcaggtgctcctgggcctcaaggatttcaaggcaatcctggtgaacctggtgaacctggtgtctctggtcccatgggtccccgtggtcctcctggtccccctggaaagcctggtgatgatggtgaagctggaaaacctggaaaagctggtgaaaggggtccgcctggtcctcagggtgctcgtggtttcccaggaaccccaggccttcctggtgtcaaaggtcacagaggttatccaggcctggacggtgctaagggagaggcgggtgctcctggtgtgaagggtgagagtggttccccgggtgagaacggatctccgggcccaatgggtcctcgtggcctgcctggtgaaagaggacggactggccctgctggcgctgcgggtgcccgaggcaacgatggtcagccaggccccgcagggcctccgggtcctgtcggtcctgctggtggtcctggcttccctggtgctcctggagccaagggtgaagccggccccactggtgcccgtggtcctgaaggtgctcaaggtcctcgcggtgaacctggtactcctgggtcccctgggcctgctggtgcctccggtaaccctggaacagatggaattcctggagccaaaggatctgctggtgctcctggcattgctggtgctcctggcttccctgggccacggggccctcctggccctcaaggtgcaactggtcctctgggcccgaaaggtcagacgggtgaacctggtattgctggcttcaaaggtgaacaaggccccaagggagaacctggccctgctggcccccagggagcccctggacccgctggtgaagaaggcaagagaggtgcccgtggagagcctggtggcgttgggcccatcggtccccctggagaaagaggtgctcccggcaaccgcggtttcccaggtcaagatggtctggcaggtcccaagggagcccctggagagcgagggcccagtggtcttgctggccccaagggagccaacggtgaccctggccgtcctggagaacctggccttcctggagcccggggtctcactggccgccctggtgatgctggtcctcaaggcaaagttggcccttctggagcccctggtgaagatggtcgtcctggacctccaggtcctcagggggctcgtgggcagcctggtgtcatgggtttccctggccccaaaggtgccaacggtgagcctggcaaagctggtgagaagggactgcctggtgctcctggtctgaggggtcttcctggcaaagatggtgagacaggtgctgcaggaccccctggccctgctggacctgctggtgaacgaggcgagcagggtgctcctgggccatctgggttccagggacttcctggccctcctggtcccccaggtgaaggtggaaaaccaggtgaccagggtgttcccggtgaagctggagcccctggcctcgtgggtcccaggggtgaacgaggtttcccaggtgaacgtggctctcccggtgcccagggcctccagggtccccgtggcctccccggcactcctggcactgatggtcccaaaggtgcatctggcccagcaggcccccctggggctcagggccctccaggtcttcagggaatgcctggcgagaggggagcagctggtatcgctgggcccaaaggcgacaggggtgacgttggtgagaaaggccctgagggagcccctggaaaggatggtggacgaggcctgacaggtcccattggcccccctggcccagctggtgctaatggcgagaagggagaagttggacctcctggtcctgcaggaagtgctggtgctcgtggcgctccgggtgaacgtggagagactgggccccccggaccagcgggatttgctgggcctcctggtgctgatggccagcctggggccaagggtgagcaaggagaggccggccagaaaggcgatgctggtgcccctggtcctcagggcccctctggagcacctgggcctcagggtcctactggagtgactggtcctaaaggagcccgaggtgcccaaggccccccgggagccactggattccctggagctgctggccgcgttggacccccaggctccaatggcaaccctggaccccctggtccccctggtccttctggaaaagatggtcccaaaggtgctcgaggagacagcggcccccctggccgagctggtgaacccggcctccaaggtcctgctggaccccctggcgagaagggagagcctggagatgacggtccctctggtgccgaaggtccaccaggtccccagggtctggctggtcagagaggcatcgtcggtctgcctgggcaacgtggtgagagaggattccctggcttgcctggcccgtcgggtgagcccggcaagcagggtgctcctggagcatctggagacagaggtcctcctggccccgtgggtcctcctggcctgacgggtcctgcaggtgaacctggacgagagggaagccccggtgctgatggcccccctggcagagatggcgctgctggagtcaagggtgatcgtggtgagactggtgctgtgggagctcctggagcccctgggccccctggctcccctggccccgctggtccaactggcaagcaaggagacagaggagaagctggtgcacaaggccccatgggaccctcaggaccagctggagcccggggaatccagggtcctcaaggccccagaggtgacaaaggagaggctggagagcctggcgagagaggcctgaagggacaccgtggcttcactggtctgcagggtctgcccggccctcctggtccttctggagaccaaggtgcttctggtcctgctggtccttctggccctagaggtcctcctggccccgtcggtccctctggcaaagatggtgctaatggaatccctggccccattgggcctcctggtccccgtggacgatcaggcgaaaccggccctgctggtcctcctggaaatcctggaccccctggtcctccaggtccccctggccctggcatcgacatgtccgcctttgctggcttaggcccgagagagaagggccccgaccccctgcagtacatgcgggccgaccaggcagccggtggcctgagacagcatgacgccgaggtggatgccacactcaagtccctcaacaaccagattgagagcatccgcagccccgagggctcccgcaagaaccctgctcgcacctgcagagacctgaaactctgccaccctgagtggaagagtggagactactggattgaccccaaccaaggctgcaccttggacgccatgaaggttttctgcaacatggagactggcgagacttgcgtctaccccaatccagcaaacgttcccaagaagaactggtggagcagcaagagcaaggagaagaaacacatctggtttggagaaaccatcaatggtggcttccatttcagctatggagatgacaatctggctcccaacactgccaacgtccagatgaccttcctacgcctgctgtccacggaaggctcccagaacatcacctaccactgcaagaacagcattgcctatctggacgaagcagctggcaacctcaagaaggccctgctcatccagggctccaatgacgtggagatccgggcagagggcaatagcaggttcacgtacactgccctgaaggatggctgcacgaaacataccggtaagtggggcaagactgttatcgagtaccggtcacagaagacctcacgcctccccatcattgacattgcacccatggacataggagggcccgagcaggaattcggtgtggacatagggccggtctgcttcttgtaa

SEQ ID NO: 570 - DNA, 1527 bp, Homo sapiens
  source 1..1527: mol_type = genomic DNA
atgaactgccagcagctgtggctgggcttcctactccccatgacagtctcaggccgggtcctggggcttgcagaggtggcgcctgtggactacctgtcacaatatgggtacctacagaagcctctagaaggatctaataacttcaagccagaagatatcaccgaggctctgagagcttttcaggaagcatctgaacttccagtctcaggtcagctggatgatgccacaagggcccgcatgaggcagcctcgttgtggcctagaggatcccttcaaccagaagacccttaaatacctgttgctgggccgctggagaaagaagcacctgactttccgcatcttgaacctgccctccacccttccaccccacacagcccgggcagccctgcgtcaagccttccaggactggagcaatgtggctcccttgaccttccaagaggtgcaggctggtgcggctgacatccgcctctccttccatggccgccaaagctcgtactgttccaatacttttgatgggcctgggagagtcctggcccatgccgacatcccagagctgggcagtgtgcacttcgacgaagacgagttctggactgaggggacctaccgtggggtgaacctgcgcatcattgcagcccatgaagtgggccatgctctggggcttgggcactcccgatattcccaggccctcatggccccagtctacgagggctaccggccccactttaagctgcacccagatgatgtggcagggatccaggctctctatggcaagaagagtccagtgataagggatgaggaagaagaagagacagagctgcccactgtgcccccagtgcccacagaacccagtcccatgccagacccttgcagtagtgaactggatgccatgatgctggggccccgtgggaagacctatgctttcaagggggactatgtgtggactgtatcagattcaggaccgggccccttgttccgagtgtctgccctttgggaggggctccccggaaacctggatgctgctgtctactcgcctcgaacacaatggattcacttctttaagggagacaaggtgtggcgctacattaatttcaagatgtctcctggcttccccaagaagctgaatagggtagaacctaacctggatgcagctctctattggcctctcaaccaaaaggtgttcctctttaagggctccgggtactggcagtgggacgagctagcccgaactgacttcagcagctaccccaaaccaatcaagggtttgtttacgggagtgccaaaccagccctcggctgctatgagttggcaagatggccgagtctacttcttcaagggcaaagtctactggcgcctcaaccagcagcttcgagtagagaaaggctatcccagaaatatttcccacaactggatgcactgtcgtccccggactatagacactaccccatcaggtgggaataccactccctcaggtacgggcataaccttggataccactctctcagccacagaaaccacgtttgaatactga

SEQ ID NO: 571 - DNA, 957 bp, Homo sapiens
  source 1..957: mol_type = genomic DNA
atgtggctgcctcttctgctgggtgccttactctgggcagtgctgtggttgctcagggaccggcagagcctgcccgccagcaatgcctttgtcttcatcaccggctgtgactcaggctttgggcgccttctggcactgcagctggaccagagaggcttccgagtcctggccagctgcctgaccccctccggggccgaggacctgcagcgggtggcctcctcccgcctccacaccaccctgttggatatcactgatccccagagcgtccagcaggcagccaagtgggtggagatgcacgttaaggaagcagggctttttggtctggtgaataatgctggtgtggctggtatcatcggacccacaccatggctgacccgggacgatttccagcgggtgctgaatgtgaacacaatgggtcccatcggggtcacccttgccctgctgcctctgctgcagcaagcccggggccgggtgatcaacatcaccagcgtcctgggtcgcctggcagccaatggtgggggctactgtgtctccaaatttggcctggaggccttctctgacagcctgaggcgggatgtagctcattttgggatacgagtctccatcgtggagcctggcttcttccgaacccctgtgaccaacctggagagtctggagaaaaccctgcaggcctgctgggcacggctgcctcctgccacacaggcccactatgggggggccttcctcaccaagtacctgaaaatgcaacagcgcatcatgaacctgatctgtgacccggacctaaccaaggtgagccgatgcctggagcatgccctgactgctcgacacccccgaacccgctacagcccaggttgggatgccaagctgctctggctgcctgcctcctacctgccagccagcctggtggatgctgtgctcacctgggtccttcccaagcctgcccaagcagtctactga

SEQ ID NO: 572 - DNA, 1608 bp, Homo sapiens
  source 1..1608: mol_type = genomic DNA
atggcgtccctttcccttgcacctgttaacatctttaaggcaggagctgatgaagagagagcagagacagctcgtctgacttcttttattggtgccatcgccattggagacttggtaaagagcaccttgggacccaaaggcatggacaaaattcttctaagcagtggacgagatgcctctcttatggtaaccaatgatggtgccactattctaaaaaacattggtgttgacaatccagcagctaaagttttagttgatatgtcaagggttcaagatgatgaagttggtgatggcactacctctgttaccgttttagcagcagaattattaagggaagcagaatctttaattgcaaaaaagattcatccacagaccatcatagcgggttggagagaagccacgaaggctgcaagagaggcgctgttgagttctgcagttgatcatggttccgatgaagttaaattccgtcaagatttaatgaatattgcgggcacaacattatcctcaaaacttcttactcatcacaaagaccactttacaaagttagctgtagaagcagttctcagactgaaaggctctggcaacctggaggcaattcatattatcaagaagctaggaggaagtttggcagattcctatttagatgaaggcttcctgttggataaaaaaattggagtaaatcaaccaaaacgaattgaaaatgctaaaattcttattgcaaatactggtatggatacagacaaaataaagatatttggttcccgggtaagagttgactctacagcaaaggttgcagaaatagaacatgcggaaaaggaaaaaatgaaggagaaagttgaacgtattcttaagcatggaataaattgctttattaacaggcaattaatttataattatcctgaacagctctttggtgctgctggtgtcatggctattgagcatgcagattttgcaggtgtggaacgcctagctcttgtcacaggtggtgaaattgcctctacctttgatcacccagaactggtgaagcttggaagttgcaaacttatcgaggaagtcatgattggagaagacaaactcattcacttttctggggttgcccttggtgaggcttgtaccattgttttgcgtggtgccactcaacaaattttagatgaagcagaaagatcattgcatgatgctctttgtgttcttgcgcaaactgtaaaggactctagaacagtttatggaggaggctgttctgagatgttgatggctcatgctgtgacacagcttgccaatagaacaccaggcaaagaagctgttgcaatggagtcttatgctaaagcactgagaatgttgccaaccatcatagctgacaatgcaggctatgacagtgcagacctggtggcacagctcagggctgctcacagtgaaggcaataccactgctggattggatatgagggaaggcaccattggagatatggctatcctgggtataacagaaagttttcaagtgaagcgacaggttcttctgagtgcagctgaagcagcagaggtgattctgcgtgtggacaacatcatcaaagcggcacccaggaaacgtgtccctgatcaccacccctgttaa

SEQ ID NO: 573 - DNA, 2172 bp, Homo sapiens
  source 1..2172: mol_type = genomic DNA
atgttaagttctatggccgctgcagggtctgtgaaggcggcgttgcaggtggccgaggtgctggaagccatcgtgagctgctgcgtggggcccgagggacggcaagttttgtgtacgaagcccactggcgaggtgcttctcagccggaatggaggccgcctcctggaggcgctacacttagagcatcccatagccaggatgatagtggactgtgtttccagtcatctcaaaaaaacaggagatggtgcaaaaacatttattatctttctttgccatttgcttagaggacttcatgcaatcacagacagagaaaaggatcctttgatgtgtgaaaacattcaaacccatggaaggcattggaaaaattgttctcggtggaaatttatttcccaggctctcctaacgtttcagacacaaatattagacggtattatggaccagtacctaagtagacactttttgtctatcttttcgtctgctaaagagagaacattgtgtaggagctctttagagttgctcttagaagcatacttttgtggaagagtgggaagaaataatcataaatttatttcacagttgatgtgtgactactttttcaagtgtatgacttgtaaaagtgggattggtgtatttgagttagtggatgaccattttgtagagttgaatgttggtgtcactggccttcctgtttcagattccaggatcatagctggtcttgtgcttcagaaagatttttctgtgtaccgcccagcagatggtgacatgcgaatggtgatagtaacagaaaccattcagcctcttttttccacttctggatcagagtttattctaaattcagaagcacagtttcagacatctcaattttggattatggaaaagacaaaagcaataatgaaacatctacatagtcagaatgtaaaattgctcatatctagtgtgaaacaaccagatttagttagttattatgcaggggtgaatggcatatcagtggttgagtgtttatcatcagaagaagtttctcttatccggaggatcattggtctttctccatttgtaccaccacaggccttttcgcagtgtgaaatacctaacactgctttggtgaaattttgtaaacctcttatccttagatccaaaagatatgttcatctaggcttgataagcacatgtgcatttataccacactctatagttctttgtggaccagtgcatggtctcattgaacaacatgaggatgctttacatggagcacttaaaatgcttcggcaattatttaaagaccttgatctaaattacatgacacaaaccaatgaccaaaatggcacttcaagtctttttatttataagaacagtggagaaagttatcaagcaccagatcctggtaatggctcaatacaaaggccttatcaggacacagttgcagagaacaaagatgcattggaaaaaactcaaacatatttaaaagtacattctaatttggtaattccagatgtagaattagaaacatatattccgtattcaacccccacactgacaccaacagatacattccaaacagttgaaacgctgacatgtttgtctttggaaagaaacaggctaactgattattatgaaccattactcaagaacaattccactgcttattcaacaaggggaaatagaatagaaatttcttacgaaaatttacaggtcacaaatattactagaaagggaagcatgttaccagtgagctgtaagttaccgaatatgggtacttcccagagttacctttcctcatctatgccagctggttgtgttttgccagtaggtggtaattttgagatcttgttacattactatcttctcaattatgccaaaaaatgccatcaatcagaagaaaccatggttagtatgataatagctaatgcacttttaggcattcccaaagtcctttataaatctaaaacaggaaagtacagctttccacatacatatataagagctgtccatgcactgcaaaccaatcaacccttggtaagcagtcagacaggtttggaatcagtaatgggtaaataccagctactaacttcagttcttcagtgtttgacaaaaatattaaccattgacatggtaatcactgttaagagacaccctcagaaagttcacaatcaagattcagaagatgaactataa

SEQ ID NO: 574 - DNA, 7440 bp, Homo sapiens
  source 1..7440: mol_type = genomic DNA
atgccacctaatataaactggaaagaaataatgaaagttgacccagatgacctgccccgtcaagaagaactggcagataatttattgatttccttatccaaggtggaagtaaatgagctaaaaagtgaaaagcaagaaaatgtgatacaccttttcagaattactcagtcactaatgaagatgaaagctcaagaagtggagctggctttggaagaagtagaaaaagctggagaagaacaagcaaaatttgaaaatcaattaaaaactaaagtaatgaaactggaaaatgaactggagatggctcagcagtctgcaggtggacgagatactcggtttttacgtaatgaaatttgccaacttgaaaaacaattagaacaaaaagatagagaattggaggacatggaaaaggagttggagaaagagaagaaagttaatgagcaattggctcttcgaaatgaggaggcagaaaatgaaaacagcaaattaagaagagagaacaaacgtctaaagaaaaagaatgaacaactttgtcaggatattattgactaccagaaacaaatagattcacagaaagaaacacttttatcaagaagaggggaagacagtgactaccgatcacagttgtctaaaaaaaactatgagcttatccaatatcttgatgaaattcagactttaacagaagctaatgagaaaattgaagttcagaatcaagaaatgagaaaaaatttagaagagtctgtacaggaaatggagaagatgactgatgaatataatagaatgaaagctattgtgcatcagacagataatgtaatagatcagttaaaaaaagaaaacgatcattatcaacttcaagtgcaggagcttacagatcttctgaaatcaaaaaatgaagaagatgatccaattatggtagctgtcaatgcaaaagtagaagaatggaagctaattttgtcttctaaagatgatgaaattattgagtatcagcaaatgttacataacctaagggagaaacttaagaatgctcagcttgatgctgataaaagtaatgttatggctctacagcagggtatacaggaacgagacagtcaaattaagatgctcaccgaacaagtagaacaatatacaaaagaaatggaaaagaatacttgtattattgaagatttgaaaaatgagctccaaagaaacaaaggtgcttcaaccctttctcaacagactcatatgaaaattcagtcaacgttagacattttaaaagagaaaactaaagaggctgagagaacagctgaactggctgaggctgatgctagggaaaaggataaagaattagttgaggctctgaagaggttaaaagattatgaatcgggagtatatggtttagaagatgctgtcgttgaaataaagaattgtaaaaaccaaattaaaataagagatcgagagattgaaatattaacaaaggaaatcaataaacttgaattgaagatcagtgatttccttgatgaaaatgaggcacttagagagcgtgtgggccttgaaccaaagacaatgattgatttaactgaatttagaaatagcaaacacttaaaacagcagcagtacagagctgaaaaccagattcttttgaaagagattgaaagtctagaggaagaacgacttgatctgaaaaaaaaaattcgtcaaatggctcaagaaagaggaaaaagaagtgcaacttcaggattaaccactgaggacctgaacctaactgaaaacatttctcaaggagatagaataagtgaaagaaaattggatttattgagcctcaaaaatatgagtgaagcacaatcaaagaatgaatttctttcaagagaactaattgaaaaagaaagagatttagaaaggagtaggacagtgatagccaaatttcagaataaattaaaagaattagttgaagaaaataagcaacttgaagaaggtatgaaagaaatattgcaagcaattaaggaaatgcagaaagatcctgatgttaaaggaggagaaacatctctaattatccctagccttgaaagactagttaatgctatagaatcaaagaatgcagaaggaatctttgatgcgagtctgcatttgaaagcccaagttgatcagcttaccggaagaaatgaagaattaagacaggagctcagggaatctcggaaagaggctataaattattcacagcagttggcaaaagctaatttaaagatagaccatcttgaaaaagaaactagtcttttacgacaatcagaaggatcaaatgttgtttttaaaggaattgacttacctgatgggatagcaccatctagtgccagtatcattaattctcagaatgaatatttaatacatttgttacaggaactagaaaataaagaaaaaaagttaaagaatttagaagattctcttgaagattacaacagaaaatttgctgtaattcgtcatcaacaaagtttgttgtataaagaatacctaagtgaaaaggagacctggaaaacagaatctaaaacaataaaagaggaaaagagaaaacttgaggatcaagtccaacaagatgctataaaagtaaaagaatataataatttgctcaatgctcttcagatggattcggatgaaatgaaaaaaatacttgcagaaaatagtaggaaaattactgttttgcaagtgaatgaaaaatcacttataaggcaatatacaaccttagtagaattggagcgacaacttagaaaagaaaatgagaagcaaaagaatgaattgttgtcaatggaggctgaagtttgtgaaaaaattgggtgtttgcaaagatttaaggaaatggccattttcaagattgcagctctccaaaaagttgtagataatagtgtttctttgtctgaactagaactggctaataaacagtacaatgaactgactgctaagtacagggacatcttgcaaaaagataatatgcttgttcaaagaacaagtaacttggaacacctggagtgtgaaaacatctccttaaaagaacaagtggagtctataaataaagaactggagattaccaaggaaaaacttcacactattgaacaagcctgggaacaggaaactaaattaggtaatgaatctagcatggataaggcaaagaaatcaataaccaacagtgacattgtttccatttcaaaaaaaataactatgctggaaatgaaggaattaaatgaaaggcagcgggctgaacattgtcaaaaaatgtatgaacacttacggacttcgttaaagcaaatggaggaacgtaattttgaattggaaaccaaatttgctgagcttaccaaaatcaatttggatgcacagaaggtggaacagatgttaagagatgaattagctgatagtgtgagcaaggcagtaagtgatgctgataggcaacggattctagaattagagaagaatgaaatggaactaaaagttgaagtgtcaaaactgagagagatttctgatattgccagaagacaagttgaaattttgaatgcacaacaacaatctagggacaaggaagtagagtccctcagaatgcaactgctagactatcaggcacagtctgatgaaaagtcgctcattgccaagttgcaccaacataatgtctctcttcaactgagtgaggctactgctcttggtaagttggagtcaattacatctaaactgcagaagatggaggcctacaacttgcgcttagagcagaaacttgatgaaaaagaacaggctctctattatgctcgtttggagggaagaaacagagcaaaacatctgcgccaaacaattcagtctctacgacgacagtttagtggagctttacccttggcacaacaggaaaagttctccaaaacaatgattcaactacaaaatgacaaacttaagataatgcaagaaatgaaaaattctcaacaagaacatagaaatatggagaacaaaacattggagatggaattaaaattaaagggcctggaagagttaataagcactttaaaggataccaaaggagcccaaaaggtaatcaactggcatatgaaaatagaagaacttcgtcttcaagaacttaaactaaatcgggaattagtcaaggataaagaagaaataaaatatttgaataacataatttctgaatatgaacgtacaatcagcagtcttgaagaagaaattgtgcaacagaacaagtttcatgaagaaagacaaatggcctgggatcaaagagaagttgacctggaacgccaactagacatttttgaccgtcagcaaaatgaaatactaaatgcggcacaaaagtttgaagaagctacaggatcaatccctgaccctagtttgccccttccaaatcaacttgagatcgctctaaggaaaattaaggagaacattcgaataattctagaaacacgggcaacttgcaaatcactagaagagaaactaaaagagaaagaatctgctttaaggttagcagaacaaaatatactgtcaagagacaaagtaatcaatgaactgaggcttcgattgcctgccactgcagaaagagaaaagctcatagctgagctaggcagaaaagagatggaaccaaaatctcaccacacattgaaaattgctcatcaaaccattgcaaacatgcaagcaaggttaaatcaaaaagaagaagtattaaagaagtatcaacgtcttctagaaaaagccagagaggagcaaagagaaattgtgaagaaacatgaggaagaccttcatattcttcatcacagattagaactacaggctgatagttcactaaataaattcaaacaaacggcttgggatttaatgaaacagtctcccactccagttcctaccaacaagcattttattcgtctggctgagatggaacagacagtagcagaacaagatgactctctttcctcactcttggtcaaactaaagaaagtatcacaagatttggagagacaaagagaaatcactgaattaaaagtaaaagaatttgaaaatatcaaattacagcttcaagaaaaccatgaagatgaagtgaaaaaagtaaaagcggaagtagaggatttaaagtatcttctggaccagtcacaaaaggagtcacagtgtttaaaatctgaacttcaggctcaaaaagaagcaaattcaagagctccaacaactacaatgagaaatctagtagaacggctaaagagccaattagccttgaaggagaaacaacagaaagcacttagtcgggcacttttagaactccgggcagaaatgacagcagctgctgaagaacgtattatttctgcaacttctcaaaaagaggcccatctcaatgttcaacaaatcgttgatcgacatactagagagctaaagacacaagttgaagatttaaatgaaaatcttttaaaattgaaagaagcacttaaaacaagtaaaaacagagaaaactcactaactgataatttgaatgacttaaataatgaactgcaaaagaaacaaaaagcctataataaaatacttagagagaaagaggaaattgatcaagagaatgatgaactgaaaaggcaaattaaaagactaaccagtggattacagggcaaacccctgacagataataaacaaagtctaattgaagaactccaaaggaaagttaaaaaactagagaaccaattagagggaaaggtggaggaagtagacctaaaacctatgaaagaaaagaatgctaaagaagaattaattaggtgggaagaaggtaaaaagtggcaagccaaaatagaaggaattcgaaacaagttaaaagagaaagagggggaagtctttactttaacaaagcagttgaatactttgaaggatctttttgccaaagccgataaagagaaacttactttgcagaggaaactaaaaacaactggcatgactgttgatcaggttttgggaatacgagctttggagtcagaaaaagaattggaagaattaaaaaagagaaatcttgacttagaaaatgatatattgtatatgagggcccaccaagctcttcctcgagattctgttgtagaagatttacatttacaaaatagatacctccaagaaaaacttcatgctttagaaaaacagttttcaaaggatacatattctaagccttcaatttcaggaatagagtcagatgatcattgtcagagagaacaggagcttcagaaggaaaacttgaagttgtcatctgaaaatattgaactgaaatttcagcttgaacaagcaaataaagatttgccaagattaaagaatcaagtcagagatttgaaggaaatgtgtgaatttcttaagaaagaaaaagcagaagttcagcggaaacttggccatgttagagggtctggtagaagtggaaagacaatcccagaactggaaaaaaccattggtttaatgaaaaaagtagttgaaaaagtccagagagaaaatgaacagttgaaaaaagcatcaggaatattgactagtgaaaaaatggctaatattgagcaggaaaatgaaaaattgaaggctgaattagaaaaacttaaagctcatcttgggcatcagttgagcatgcactatgaatccaagaccaaaggcacagaaaaaattattgctgaaaatgaaaggcttcgtaaagaacttaaaaaagaaactgatgctgcagagaaattacggatagcaaagaataatttagagatattaaatgagaagatgacagttcaactagaagagactggtaagagattgcagtttgcagaaagcagaggtccacagcttgaaggtgctgacagtaagagctggaaatccattgtggttacaagaatgtatgaaaccaagttaaaagaattggaaactgatattgccaaaaaaaatcaaagcattactgaccttaaacagcttgtaaaagaagcaacagagagagaacaaaaagttaacaaatacaatgaagaccttgaacaacagattaagattcttaaacatgttcctgaaggtgctgagacagagcaaggccttaaacgggagcttcaagttcttagattagctaatcatcagctggataaagagaaagcagaattaatccatcagatagaagctaacaaggaccaaagtggagctgaaagcaccatacctgatgctgatcaactaaaggaaaaaataaaagatctagagacacagctcaaaatgtcagatctagaaaagcagcatttgaaggaggaaataaagaagctgaaaaaagaactggaaaattttgatccttcattttttgaagaaattgaagatcttaagtataattacaaggaagaagtgaagaagaatattctcttagaagagaaggtaaaaaaactttcagaacaattgggagttgaattaactagccctgttgctgcttctgaagagtttgaagatgaagaagaaagtcctgttaatttccccatttactaa

SEQ ID NO: 575 - DNA, 1437 bp, Homo sapiens
  source 1..1437: mol_type = genomic DNA
atggcctcagccacggaggaccccgttctggagcgttatttcaaaggccacaaagctgcgatcacctccttggacctcagccccaacggcaagcaacttgctactgcttcttgggatacctttctcatgctatggaatttcaagccacatgctagagcttacagatatgtgggtcacaaggatgttgtaaccagcgtgcagttttctccacatggaaacttattggcgtctgcctcacgagacagaaccgtgagactctggattcctgataagagaggaaaattctcagaatttaaagctcatacagctccagttcgaagtgtagacttttcagctgatggccagtttctagctacagcttctgaagacaaatccataaaagtatggagcatgtatcgccagcgcttcctgtattccttgtatcgacatacacactgggtacgctgtgccaaattttcacccgatggaagactaattgtgtcatgtagtgaggataaaactattaaaatttgggataccacaaataagcaatgtgttaataacttctcagattccgttggatttgcaaattttgtggactttaaccctagtggtacatgcatagcttcagcaggttctgatcaaactgtgaaagtctgggatgtaagagtgaacaaattactacagcattaccaagttcacagcggtggagttaattgcatatcattccatccttcgggtaactatctcatcacagcttcttcagatggtacccttaagattctggacctcttagaaggaaggctcatctatacacttcaaggacatacgggacctgtctttactgtttcattttcaaaaggtggagagctatttgcatcaggaggtgcagacacacaggtcttattatggaggactaactttgatgaattgcattgtaaaggtcttaccaaaagaaatctcaaaagattacattttgattcaccaccacatcttcttgatatctacccaagaacaccacatccccatgaggaaaaagttgagactgtagaaattaatccaaagcttgaggtaatcgatttgcagatctctactccccctgttatggatatcctttcttttgattctaccacaacaacagaaaccagtggtaggactctgccagacaagggtgaagaggcctgtggatatttcttgaacccttccttaatgtcaccagaatgtttgccaacaaccacgaaaaagaaaacagaagacatgagtgacctcccctgtgaaagtcaaaggagcatacctctcgctgtgactgatgctttagagcatattatggaacaactcaatgttttgacacagactgtttcaatcttggagcagcgactgactttgacagaggataagctgaaagactgccttgaaaatcagcaaaagcttttcagtgctgtccaacagaaaagctga

SEQ ID NO: 576 - DNA, 1191 bp, Homo sapiens
  source 1..1191: mol_type = genomic DNA
atgttgtcagaagtcctactggtgtctgctccggggaaagtcatccttcatggagaacatgccgtggtacatggcaaggtagcactggctgtatccttgaacttgagaacattcctccggcttcaaccccacagcaatgggaaagtggacctcagcttacccaacattggtatcaagcgggcctgggatgtggccaggcttcagtcactggacacaagctttctggagcaaggtgatgtcacaacacccacctcagagcaagtggagaagctaaaggaggttgcaggcttgcctgacgactgtgctgtcaccgagcgcctggctgtgctggcctttctttacttatacctgtccatctgccggaagcagagggccctgccgagcctggatatcgtagtgtggtcggagctgccccccggggcgggcttgggctccagcgccgcctactcggtgtgtctggcagcagccctcctgactgtgtgcgaggagatcccaaacccgctgaaggacggggattgcgtcaacaggtggaccaaggaggatttggagctaattaacaagtgggccttccaaggggagagaatgattcacgggaacccctccggagtggacaatgctgtcagcacctggggaggagccctccgataccatcaagggaagatttcatccttaaagaggtcgccagctctccagatcctgctgaccaacaccaaagtccctcgcaataccagggcccttgtggctggcgtcagaaacaggctgctcaagttcccagagatcgtggcccccctcctgacctcaatagatgccatctccctggagtgtgagcgcgtgctgggagagatgggggaagccccagccccggagcagtacctcgtgctggaagagctcattgacatgaaccagcaccatctgaatgccctcggcgtgggccacgcctctctggaccagctctgccaggtgaccagggcccgcggacttcacagcaagctgactggcgcaggcggtggtggctgtggcatcacactcctcaagccagggctggagcagccagaagtggaggccacgaagcaggccctgaccagctgtggctttgactgcttggaaaccagcatcggtgcccccggcgtctccatccactcagccacctccctggacagccgagtccagcaagccctggatggcctctga

SEQ ID NO: 577 - DNA, 2031 bp, Homo sapiens
  source 1..2031: mol_type = genomic DNA
atgagtgatcaaattaaattcattatggacagtctcaataaggagccctttaggaagaactataatttaatcacgtttgattccttggagccaatgcaactattacaagttctcagtgatgttctggctgagattgacccaaagcaacttgtggatatcagagaggagatgccagagcagacagccaaacgaatgttgagccttcttggtattcttaagtacaaaccttcaggaaatgccacagatatgagtacttttcgtcagggtttggtgattggaagtaaacctgtaatttacccagtgctccactggcttcttcagaggactaatgaactgaagaaaagagcatatttagctcgttttttaataaaacttgaggtaccaagtgagtttcttcaggatgaaactgtggctgacaccaataaacagtatgaagagttaatggaagcctttaaaactttgcataaagaatatgagcagctcaagatatctggattttctacagcagaaataagaaaggatatcagtgcaatggaagaagaaaaggatcagctcattaagagagttgaacatttgaagaaaagggttgagacagctcagaatcatcaatggatgcttaaaatagcaaggcaacttcgagttgaaaaagagagagaagaatatcttgcacaacagaaacaggaacaaaagaatcagctatttcatgcagtgcaaagattgcaaagagtacaaaaccagctgaaaagcatgcgccaagctgcagcagatgcaaagcctgaaagtttaatgaagaggctagaggaggagataaaatttaatttatatatggtaactgaaaaatttcctaaagaattagaaaataagaaaaaggaattacattttttacaaaaagtagtttcagagccagctatgggccattctgatcttcttgaacttgaatctaaaataaatgaaataaacacagaaattaaccagttgattgaaaagaaaatgatgagaaatgagcccattgaaggcaaactctcactgtataggcaacaggcatctatcatttcccgtaaaaaagaagccaaagctgaggaacttcaggaggccaaggagaagttagccagcctagagagagaagcatcagtaaagagaaatcagacccgtgaatttgatggtactgaagttttaaagggagatgagttcaaacgatatgtcaataaacttcgaagcaagagtacagttttcaaaaagaagcatcagataatagctgaacttaaagctgaattcggtcttttgcagaggactgaagaacttcttaagcaacgtcatgaaaatattcaacaacaactgcaaactatggaggagaaaaagggtatatctggatatagttacacccaagaagagctagaaagagtatctgcactgaagagtgaagttgatgaaatgaaaggacgaacattggatgatatgtctgaaatggtgaaaaaactgtattcattggtatctgaaaagaagtcagctcttgcctcagttataaaagagctacgacagttgcgtcaaaaatatcaagaactgacccaggagtgtgatgaaaagaaatcccagtatgatagctgtgcagcaggcctcgaaagcaatcggtccaaattagaacaggaagttagaagactccgtgaagaatgtcttcaagaagaaagtagataccattatacaaattgtatgattaagaacctagaagttcaacttcgtcgtgctactgatgagatgaaggcatatatctcttctgatcaacaagaaaaaagaaaggcaattagggaacagtataccaaaaatactgctgaacaagaaaaccttggaaagaaacttcgggaaaaacaaaaagttatacgagaaagtcatggtccaaatatgaaacaagcaaaaatgtggcgtgatttggaacaattaatggaatgtaagaaacagtgctttctgaaacaacaaagccaaacttccattggtcaggtaattcaggagggtggggaggaccggctaatactgtga

SEQ ID NO: 578 - DNA, 501 bp, Homo sapiens
  source 1..501: mol_type = genomic DNA
atgagcaccgtgggtttatttcattttcctacaccactgacccgaatatgcccggcgccatggggactccggctttgggagaagctgacgttgttatccccaggaatagctgtcactccggtccagatggcaggcaagaaggactaccctgcactgctttccttggatgagaatgaactcgaagagcagtttgtgaaaggacacggtccagggggccaggcaaccaacaaaaccagcaactgcgtggtgctgaagcacatcccctcaggcatcgttgtaaagtgccatcagacaagatcagttgatcagaacagaaagctagctcggaaaatcctacaagagaaagtagatgttttctacaatggtgaaaacagtcctgttcacaaagaaaaacgagaagcggcgaagaaaaaacaagaaaggaaaaaaagagcaaaggaaaccctggaaaaaaagaagctacttaaagaactgtgggagtcaagtaaaaaggtccactga

SEQ ID NO: 579 - DNA, 801 bp, Homo sapiens
  source 1..801: mol_type = genomic DNA
atggtgaaggtgacgttcaactccgctctggcccagaaggaggccaagaaggacgagcccaagagcggcgaggaggcgctcatcatcccccccgacgccgtcgcggtggactgcaaggacccagatgatgtggtaccagttggccaaagaagagcctggtgttggtgcatgtgctttggactagcatttatgcttgcaggtgttattctaggaggagcatacttgtacaaatattttgcacttcaaccagatgacgtgtactactgtggaataaagtacatcaaagatgatgtcatcttaaatgagccctctgcagatgccccagctgctctctaccagacaattgaagaaaatattaaaatctttgaagaagaagaagttgaatttatcagtgtgcctgtcccagagtttgcagatagtgatcctgccaacattgttcatgactttaacaagaaacttacagcctatttagatcttaacctggataagtgctatgtgatccctctgaacacttccattgttatgccacccagaaacctactggagttacttattaacatcaaggctggaacctatttgcctcagtcctatctgattcatgagcacatggttattactgatcgcattgaaaacattgatcacctgggtttctttatttatcgactgtgtcatgacaaggaaacttacaaactgcaacgcagagaaactattaaaggtattcagaaacgtgaagccagcaattgtttcgcaattcggcattttgaaaacaaatttgccgtggaaactttaatttgttcttga

SEQ ID NO: 580 - DNA, 2787 bp, Homo sapiens
  source 1..2787: mol_type = genomic DNA
atgccgcccaaaaccccccgaaaaacggccgccaccgccgccgctgccgccgcggaacccccggcaccgccgccgccgccccctcctgaggaggacccagagcaggacagcggcccggaggacctgcctctcgtcaggcttgagtttgaagaaacagaagaacctgattttactgcattatgtcagaaattaaagataccagatcatgtcagagagagagcttggttaacttgggagaaagtttcatctgtggatggagtattgggaggttatattcaaaagaaaaaggaactgtggggaatctgtatctttattgcagcagttgacctagatgagatgtcgttcacttttactgagctacagaaaaacatagaaatcagtgtccataaattctttaacttactaaaagaaattgataccagtaccaaagttgataatgctatgtcaagactgttgaagaagtatgatgtattgtttgcactcttcagcaaattggaaaggacatgtgaacttatatatttgacacaacccagcagttcgatatctactgaaataaattctgcattggtgctaaaagtttcttggatcacatttttattagctaaaggggaagtattacaaatggaagatgatctggtgatttcatttcagttaatgctatgtgtccttgactattttattaaactctcacctcccatgttgctcaaagaaccatataaaacagctgttatacccattaatggttcacctcgaacacccaggcgaggtcagaacaggagtgcacggatagcaaaacaactagaaaatgatacaagaattattgaagttctctgtaaagaacatgaatgtaatatagatgaggtgaaaaatgtttatttcaaaaattttataccttttatgaattctcttggacttgtaacatctaatggacttccagaggttgaaaatctttctaaacgatacgaagaaatttatcttaaaaataaagatctagatgcaagattatttttggatcatgataaaactcttcagactgattctatagacagttttgaaacacagagaacaccacgaaaaagtaaccttgatgaagaggtgaatgtaattcctccacacactccagttaggactgttatgaacactatccaacaattaatgatgattttaaattcagcaagtgatcaaccttcagaaaatctgatttcctattttaacaactgcacagtgaatccaaaagaaagtatactgaaaagagtgaaggatataggatacatctttaaagagaaatttgctaaagctgtgggacagggttgtgtcgaaattggatcacagcgatacaaacttggagttcgcttgtattaccgagtaatggaatccatgcttaaatcagaagaagaacgattatccattcaaaattttagcaaacttctgaatgacaacatttttcatatgtctttattggcgtgcgctcttgaggttgtaatggccacatatagcagaagtacatctcagaatcttgattctggaacagatttgtctttcccatggattctgaatgtgcttaatttaaaagcctttgatttttacaaagtgatcgaaagttttatcaaagcagaaggcaacttgacaagagaaatgataaaacatttagaacgatgtgaacatcgaatcatggaatcccttgcatggctctcagattcacctttatttgatcttattaaacaatcaaaggaccgagaaggaccaactgatcaccttgaatctgcttgtcctcttaatcttcctctccagaataatcacactgcagcagatatgtatctttctcctgtaagatctccaaagaaaaaaggttcaactacgcgtgtaaattctactgcaaatgcagagacacaagcaacctcagccttccagacccagaagccattgaaatctacctctctttcactgttttataaaaaagtgtatcggctagcctatctccggctaaatacactttgtgaacgccttctgtctgagcacccagaattagaacatatcatctggacccttttccagcacaccctgcagaatgagtatgaactcatgagagacaggcatttggaccaaattatgatgtgttccatgtatggcatatgcaaagtgaagaatatagaccttaaattcaaaatcattgtaacagcatacaaggatcttcctcatgctgttcaggagacattcaaacgtgttttgatcaaagaagaggagtatgattctattatagtattctataactcggtcttcatgcagagactgaaaacaaatattttgcagtatgcttccaccaggccccctaccttgtcaccaatacctcacattcctcgaagcccttacaagtttcctagttcacccttacggattcctggagggaacatctatatttcacccctgaagagtccatataaaatttcagaaggtctgccaacaccaacaaaaatgactccaagatcaagaatcttagtatcaattggtgaatcattcgggacttctgagaagttccagaaaataaatcagatggtatgtaacagcgaccgtgtgctcaaaagaagtgctgaaggaagcaaccctcctaaaccactgaaaaaactacgctttgatattgaaggatcagatgaagcagatggaagtaaacatctcccaggagagtccaaatttcagcagaaactggcagaaatgacttctactcgaacacgaatgcaaaagcagaaaatgaatgatagcatggatacctcaaacaaggaagagaaatga

SEQ ID NO: 581 - DNA, 1596 bp, Homo sapiens
  source 1..1596: mol_type = genomic DNA
atggtggatgtcggaaagtggcccatcttcactctactctcccctcaagagatcgcgtctattcggaaggcgtgtgtcttcggcacctcagccagtgaagcactgtacgttactgacaatgatgaggtctttgtatttggactgaactatagtaactgtctaggaactggagataaccagagtacacttgtacccaaaaagctagaaggcttatgtggaaagaagattaaaagcctcagttacgggagtggaccacatgttcttctcagcaccgaagatggagtggtttatgcctggggccacaatggatatagccagcttgggaatgggacgaccaaccaaggcattgctcccgtccaggtctgtaccaatctcttgatcaagcaagtggtggaagtagcttgtggctcacatcattcaatggctctggcagctgatggagaggtgtttgcttggggttataacaactgtggccaagtgggatcaggttctacagcaaatcaaccaactcctcgaaaagttacaaactgtttacatattaagagggtagttggcattgcctgtggtcagacttcatccatggctgttctggacaatggcgaggtatatggctggggttacaatggcaacggtcagctgggcctgggaaacaatggcaaccagctgacccctgtgagagtggcagctttgcacagcgtgtgtgtgaaccagattgtctgcggttacgcacatactctagcactaacagatgagggcttgctgtatgcctggggagctaacacatatgggcagctgggaactggcaataaaaataacctgctaagcccagcacacatcatggtggagaaagaaagggtggtagagattgcagcctgtcactctgcccacacgtctgcagccaagacgcagggtgggcacgtgtacatgtggggccagtgccggggtcagtccgtgatcctcccgcacctcacccacttctcctgcaccgacgacgtgtttgcctgctttgccactcccgccgtctcgtggcgcctcctgtctgtggagcatgaagactttttaacagttgcagagtcactgaagaaagaatttgatagtccagaaactgctgatctgaagtttcgaattgatggaaaatatattcatgtccataaagctgttttgaaaatcaggtgtgagcattttcgatccatgttccagtcgtattggaatgaagacatgaaggaagtgatagaaatcgatcagttttcttacccagtgtatcgtgcctttctccagtacctctacacagacacagtcgacctgccgccagaagatgctataggtcttctggatttggcgacatcttactgtgaaaacagactgaaaaaactttgtcagcacattatcaagagaggaattactgtggagaatgccttttcgctattctctgctgcagtcagatatgatgcagaggatttagaagaattctgctttaagttttgcatcaatcatttgacagaagttacacagactgcagcattttggcaaatggatggccctctgctaaaggaattcattgctaaagccagtaaatgtggagcctttaagaactga

SEQ ID NO: 582 - DNA, 1692 bp, Homo sapiens
  source 1..1692: mol_type = genomic DNA
atggatttcgggtctttggagaccgtggtggccaactctgccttcatcgccgcccgaggcagctttgacggcagcagctcccaaccctcccgggacaagaagtacctggccaagctcaagctgcccccgctgtccaagtgtgagtccctccgcgacagcctcagcctggagtttgagagtgtgtgcttggagcagcccatcggcaagaagctctttcagcagttcctacaatcggcagagaagcacctgccggccctggagctctggaaagacatcgaggactatgacacggcagacaatgacctccagccacagaaggcccagaccatcctggcccagtacctggacccccaggccaaactcttctgcagcttcctggatgaggggatagtggcgaagtttaaggaggggcctgtggagatccaggacgggctcttccagcccctgctgcaggccaccctggcacacctgggccaagcccccttccaggagtacctgggcagcctgtacttcctgaggttcctgcagtggaagtggctggaagcccagcccatgggggaggactggttcctggacttcagggtcctagggaaagggggcttcggggaggtgtcggcctgccagatgaaggcgaccggcaagctgtatgcctgcaagaagctgaacaagaagcggctgaagaagaggaagggctaccagggtgctatggtggagaagaagattctgatgaaagtacacagcaggttcatcgtgtctctggcctatgcgtttgaaaccaaagccgacctctgtctggtgatgaccatcatgaacggaggtgacatcaggtaccacatctacaacgtgaatgaggagaaccctggcttcccggagccgcgcgccctcttctacacggcgcagatcatctgcggcctggagcacctgcaccagaggcggatcgtctaccgcgacctcaagcccgagaacgtgctgctggacaatgacggcaatgtccggatctctgaccttgggctggccgtggagctgctggacggacagagcaagaccaagggctacgcagggaccccaggtttcatggcccccgagctcctgcagggcgaggagtacgacttctccgtggactactttgccctgggggtcaccctgtatgagatgattgcggccagaggacccttccgagcccgtggagagaaggtggagaacaaggagctgaagcaccggatcatctcagagcccgtgaagtaccctgataagttcagccaggccagcaaggacttctgcgaggcgctgctggagaaggacccggagaagcgcctggggttcagagatgagacctgcgacaagctccgtgcccaccccctcttcaaggaccttaactggaggcagctggaggctgggatgctgatgccccctttcatcccagactccaaaactgtctacgcaaaggatattcaggacgtgggtgccttttccaccgtcaaaggtgtggcctttgacaaaacagacacagaattctttcaggaatttgccactggcaactgccccatcccctggcaggaggagatgatcgagacgggcatctttggcgagctgaacgtgtggcgctcggacggtcagatgccggacgacatgaagggcatctccgggggctccagctcctcgtccaagtcagggatgtgtctggtttcctag

SEQ ID NO: 583 - DNA, 3861 bp, Homo sapiens
  source 1..3861: mol_type = genomic DNA
atgtcacatctggtggaccctacatcaggagacttgccagttagagacatagatgctatacctctggtgctaccagcctcaaaaggtaagaatatgaaaactcaaccacccttgagcaggatgaaccgggaggaattggaggacagtttctttcgacttcgcgaagatcacatgttggtgaaggagctttcttggaagcaacaggatgagatcaaaaggctgaggaccaccttgctgcggttgaccgctgctggccgggacctgcgggtcgcggaggaggcggcgccgctctcggagaccgcaaggcgcgggcagaaggcgggatggcggcagcgcctctccatgcaccagcgcccccagatgcaccgactgcaagggcatttccactgcgtcggccctgccagcccccgccgcgcccagcctcgcgtccaagtgggacacagacagctccacacagccggtgcaccggtgccggagaaacccaagagggggccaagggacaggctgagctacacagcccctccatcgtttaaggagcatgcgacaaatgaaaacagaggtgaagtagccagtaaacccagtgaacttgtttctggttctaacagcataatttctttcagcagtgtcataagtatggctaaacccattggtctatgcatgcctaacagtgcccacatcatggccagcaataccatgcaagtggaagagccacccaagtctcctgagaaaatgtggcctaaagatgaaaattttgaacagagaagctcattggagtgtgctcagaaggctgcagagcttcgagcttccattaaagagaaggtagagctgattcgacttaagaagctcttacatgaaagaaatgcttcattggttatgacaaaagcacaattaacagaagttcaagaggcatacgaaaccttgctccagaagaatcagggaatcctgagtgcagcccatgaggccctcctcaagcaagtgaatgagctcagggcagagctgaaggaagaaagcaagaaggctgtgagcttgaagagccaactggaagatgtgtctatcttgcagatgactctgaaggagtttcaggagagagttgaagatttggaaaaagaacgaaaattgctgaatgacaattatgacaaactcttagaaagcatgctggacagcagtgacagctccagtcagccccactggagcaacgagctcatagcggaacagctacagcagcaagtctctcagctgcaggatcagctggatgctgagctggaggacaagagaaaagttttacttgagctgtccagggagaaagcccaaaatgaggatctgaagcttgaagtcaccaacatacttcagaagcataaacaggaagtagagctcctccaaaatgcagccacaatttcccaacctcctgacaggcaatctgaaccagccactcacccagctgtattgcaagagaacactcagatcgagccaagtgaacccaaaaaccaagaagaaaagaaactgtcccaggtgctaaatgagttgcaagtatcacacgcagagaccacattggaactagaaaagaccagggacatgcttattctgcagcgcaaaatcaacgtgtgttatcaggaggaactggaggcaatgatgacaaaagctgacaatgataatagagatcacaaagaaaagctggagaggttgactcgactactagacctcaagaataaccgtatcaagcagctggaaggtattttaagaagccatgaccttccaacatctgaacagctcaaagatgttgcttatggcacccgaccgttgtcgttatgtttggaaacactgccagcccatggagatgaggataaagtggatatttctctgctgcatcagggtgagaatctttttgaactgcacatccaccaggccttcctgacatctgccgccctagctcaggctggagatacccaacctaccactttctgcacctattccttctatgactttgaaacccactgtaccccattatctgtggggccacagcccctctatgacttcacctcccagtatgtgatggagacagattcgcttttcttacactaccttcaagaggcttcagcccggcttgacatacaccaggccatggccagtgaacacagcactcttgctgcaggatggatttgctttgacagggtgctagagactgtggagaaagtccatggcttggccacactgattggagctggtggagaagagttcggggttctagagtactggatgaggctgcgtttccccataaaacccagcctacaggcgtgcaataaacgaaagaaagcccaggtctacctgtcaaccgatgtgcttggaggccggaaggcccaggaagaggagttcagatcggagtcttgggaacctcagaacgagctgtggattgaaatcaccaagtgctgtggcctccggagtcgatggctgggaactcaacccagtccatatgctgtgtaccgcttcttcaccttttctgaccatgacactgccatcattccagccagtaacaacccctactttagagaccaggctcgattcccagtgcttgtgacctctgacctggaccattatctgagacgggaggccttgtctatacatgtttttgatgatgaagacttagagcctggctcgtatcttggccgagcccgagtgcctttactgcctcttgcaaaaaatgaatctatcaaaggtgattttaacctcactgaccctgcagagaaacccaacggatctattcaagtgcaactggattggaagtttccctacataccccctgagagcttcctgaaaccagaagctcagactaaggggaaggataccaaggacagttcaaagatctcatctgaagaggaaaaggcttcatttccttcccaggatcagatggcatctcctgaggttcccattgaagctggccagtatcgatctaagagaaaacctcctcatgggggagaaagaaaggagaaggagcaccaggttgtgagctactcaagaagaaaacatggcaaaagaataggtgttcaaggaaagaatagaatggagtatcttagccttaacatcttaaatggaaatacaccagagcaggtgaattacactgagtggaagttctcagagactaacagcttcataggtgatggctttaaaaatcagcacgaggaagaggaaatgacattatcccattcagcactgaaacagaaggaacctctacatcctgtaaatgacaaagaatcctctgaacaaggttctgaagtcagtgaagcacaaactaccgacagtgatgatgtcatagtgccacccatgtctcagaaatatcctaaggcagattcagagaagatgtgcattgaaattgtctccctggccttctacccagaggcagaagtgatgtctgatgagaacataaaacaggtgtatgtggagtacaaattctacgacctacccttgtcggagacagagactccagtgtccctaaggaagcctagggcaggagaagaaatccactttcactttagcaaggtaatagacctggacccacaggagcagcaaggccgaaggcggtttctgttcgacatgctgaatggacaagatcctgatcaaggacatttaaagtttacagtggtaagtgatcctctggatgaagaaaagaaagaatgtgaagaagtgggatatgcatatcttcaactgtggcagatcctggagtcaggaagagatattctagagcaagagctagacattgttagccctgaagatctggctaccccaataggaaggctgaaggtttcccttcaagcagctgctgtcctccatgctatttacaaggagatgactgaagatttgttttcatga

SEQ ID NO: 584 - DNA, 714 bp, Homo sapiens
  source 1..714: mol_type = genomic DNA
atggccctgccccccagccccctggccatggaatatgtcaatgactttgacttgatgaagtttgaggtaaagcgggaaccctctgagggccgacctggcccccctacagcctcactgggctccacaccttacagctcagtgcctccttcacccaccttcagtgaaccaggcatggtgggggcaaccgagggcacccggccaggcctggaggagctgtactggctggctaccctgcagcagcagctgggggctggggaggcattggggctgagtcctgaagaggccatggagctgctgcagggtcagggcccagtccctgttgatgggccccatggctactacccagggagcccagaggagacaggagcccagcacgtccagctggcagagcggttttccgacgcggcgctggtctcgatgtctgtgcgggagctaaaccggcagctgcggggctgcgggcgcgacgaggcgctgcggctgaagcagaggcgccgcacgctgaagaaccgcggctacgcgcaggcctgtcgctccaagcggctgcagcagcggcgcgggctggaggccgagcgcgcccgcctggccgcccagctggacgcgctgcgggccgaggtggcccgcctggcccgggagcgcgatctctacaaggctcgctgtgaccggctaacctcgagcggccccgggtccggggacccctcccacctcttcctctga

SEQ ID NO: 585 - DNA, 870 bp, Homo sapiens
  source 1..870: mol_type = genomic DNA
atgatgtcttatcttaagcaaccgccttacgcagtcaatgggctgagtctgaccacttcgggtatggacttgctgcacccctccgtgggctacccggccaccccccggaaacagcgccgggagaggacgacgttcactcgggcgcagctagatgtgctggaagcactgtttgccaagacccggtacccagacatcttcatgcgagaggaggtggcactgaaaatcaacttgcccgagtcgagggtgcaggtatggtttaagaatcgaagagctaagtgccgccaacaacagcaacaacagcagaatggaggtcaaaacaaagtgagacctgccaaaaagaagacatctccagctcgggaagtgagttcagagagtggaacaagtggccaattcactcccccctctagcacctcagtcccgaccattgccagcagcagtgctcctgtgtctatctggagcccagcttccatctccccactgtcagatcccttgtccacctcctcttcctgcatgcagaggtcctatcccatgacctatactcaggcttcaggttatagtcaaggatatgctggctcaacttcctactttgggggcatggactgtggatcatatttgacccctatgcatcaccagcttcccggaccaggggccacactcagtcccatgggtaccaatgcagtcaccagccatctcaatcagtccccagcttctctttccacccagggatatggagcttcaagcttgggttttaactcaaccactgattgcttggattataaggaccaaactgcctcctggaagcttaacttcaatgctgactgcttggattataaagatcagacatcctcgtggaaattccaggttttgtga

SEQ ID NO: 586 - DNA, 957 bp, Homo sapiens
  source 1..957: mol_type = genomic DNA
atggttgagctcatgttcccgctgttgctcctccttctgcccttccttctgtatatggctgcgccccaaatcaggaaaatgctgtccagtggggtgtgtacatcaactgttcagcttcctgggaaagtagttgtggtcacaggagctaatacaggtatcgggaaggagacagccaaagagctggctcagagaggagctcgagtatatttagcttgccgggatgtggaaaagggggaattggtggccaaagagatccagaccacgacagggaaccagcaggtgttggtgcggaaactggacctgtctgatactaagtctattcgagcttttgctaagggcttcttagctgaggaaaagcacctccacgttttgatcaacaatgcaggagtgatgatgtgtccgtactcgaagacagcagatggctttgagatgcacataggagtcaaccacttgggtcacttcctcctaacccatctgctgctagagaaactaaaggaatcagccccatcaaggatagtaaatgtgtcttccctcgcacatcacctgggaaggatccacttccataacctgcagggcgagaaattctacaatgcaggcctggcctactgtcacagcaagctagccaacatcctcttcacccaggaactggcccggagactaaaaggctctggcgttacgacgtattctgtacaccctggcacagtccaatctgaactggttcggcactcatctttcatgagatggatgtggtggcttttctcctttttcatcaagactcctcagcagggagcccagaccagcctgcactgtgccttaacagaaggtcttgagattctaagtgggaatcatttcagtgactgtcatgtggcatgggtctctgcccaagctcgtaatgagactatagcaaggcggctgtgggacgtcagttgtgacctgctgggcctcccaatagactaa

SEQ ID NO: 587 - DNA, 951 bp, Homo sapiens
  source 1..951: mol_type = genomic DNA
atgctggtcaccttgggactgctcacctccttcttctcgttcctgtatatggtagctccatccatcaggaagttctttgctggtggagtgtgtagaacaaatgtgcagcttcctggcaaggtagtggtgatcactggcgccaacacgggcattggcaaggagacggccagagagctcgctagccgaggagcccgagtctatattgcctgcagagatgtactgaagggggagtctgctgccagtgaaatccgagtggatacaaagaactcccaggtgctggtgcggaaattggacctatccgacaccaaatctatccgagcctttgctgagggctttctggcagaggaaaagcagctccatattctgatcaacaatgcgggagtaatgatgtgtccatattccaagacagctgatggctttgaaacccacctgggagtcaaccacctgggccacttcctcctcacctacctgctcctggagcggctaaaggtgtctgcccctgcacgggtggttaatgtgtcctcggtggctcaccacattggcaagattcccttccacgacctccagagcgagaagcgctacagcaggggttttgcctattgccacagcaagctggccaatgtgctttttactcgtgagctggccaagaggctccaaggcaccggggtcaccacctacgcagtgcacccaggcgtcgtccgctctgagctggtccggcactcctccctgctctgcctgctctggcggctcttctccccctttgtcaagacggcacgggagggggcgcagaccagcctgcactgcgccctggctgagggcctggagcccctgagtggcaagtacttcagtgactgcaagaggacctgggtgtctccaagggcccgaaataacaaaacagctgagcgcctatggaatgtcagctgtgagcttctaggaatccggtgggagtag

SEQ ID NO: 588 - DNA, 3846 bp, Homo sapiens
  source 1..3846: mol_type = genomic DNA
atgccaatcgtgatggcccgggacctggaggaaacagcatcatcctcagaggatgaggaggtcataagtcaagaggatcatccatgcatcatgtggactggaggctgcaggagaattccagttttggtattccatgccgacgctattcttacaaaggacaacaatattagagtaattggagaacgttatcatttgtcttataagattgtacgaacggacagtcgcctagtacgcagcattctgacagcccatggatttcatgaagttcacccaagcagcactgactataacctaatgtggacaggatcccacctgaagcccttcttactgcgcaccctctctgaagcacaaaaagttaatcactttcccaggtcttatgaacttacccggaaggaccgactgtacaaaaacattattcgaatgcagcatacacatggattcaaggcttttcacatcctcccccagaccttcctcctgccagctgagtacgcggaattttgtaattcatattcgaaggaccggggaccttggatagtaaaaccagtggcatcttcaagggggcggggcgtctacctgatcaacaatccaaaccagatctccctggaagagaacattttggtctcccgttacattaacaaccccctgctcatagatgatttcaagtttgacgtgcgcctctatgtgctcgtgacttcctatgatcctcttgtcatctatctctatgaagaaggattggctaggtttgcaactgtgcgatatgatcaaggagccaagaacattcggaaccagttcatgcatctgacaaactacagtgtcaacaagaaaagtggagattacgtcagttgtgacgatccagaagtggaggattatggaaacaaatggagcatgagtgctatgcttaggtacctgaaacaagaaggcagagatacaaccgcattgatggcccatgtagaagacctgatcattaagactataatctctgctgaactagctattgctactgcctgtaaaacctttgttcctcatcgcagcagttgttttgaactctatggctttgacgtgctcatagattctactctgaagccatggttgttggaagtgaatctctctccttctttggcctgtgatgcgcctctggacctaaagattaaagccagtatgatttcagatatgttcactgttgtaggatttgtgtgccaagatcctgcccagcgggcatcaactcggccaatttatcccacctttgagtcttccaggcgaaaccctttccagaaacctcagcgttgccgtccactctctgccagtgatgcggaaatgaaaaacctcgtgggctcagcccgggagaaagggccagggaagttgggtggttctgtgcttggtctgtcaatggaggagatcaaagttttacgaagggtgaaggaggagaatgatcggcgaggtggatttattcgcatatttcctacatctgagacatgggaaatatatgggtcctacctcgagcataagacctcaatgaactatatgctggcaacacgcctcttccaggacagaatgactgctgatggagcgccagaattgaagatagagagtctgaattcaaaggccaagctgcatgctgcactttacgagaggaagctcctgtctctggaggtgcgaaaacgtagacgacggagtagcagattgagggcaatgaggccaaaatacccagtgattacccaaccagctgaaatgaatgttaaaactgagacagagagtgaagaggaggaagaagtcgcattagataatgaagatgaagaacaggaggcttcccaggaggagtctgcaggatttcttagagaaaatcaagccaaatatacaccctcattgacagctttggtagaaaatacacccaaagaaaattccatgaaagttcgtgaatggaataataaaggtggacactgctgcaaacttgagactcaggagctagagcctaaatttaacctgatgcagattcttcaagataatggcaatcttagcaaaatgcaggcccgaatagcattctctgcctatctccagcatgttcaaattcgcctgatgaaagacagtggcggtcagacgttcagtgccagttgggctgccaaagaggatgaacagatggagctggttgttcgtttcctcaagcgagcatcaaataacctccagcattcactgaggatggtattacccagtcgacgattggcacttctggaacgcagaagaatcctggcccaccagctgggtgactttatcattgtatacaacaaggaaacagaacaaatggctgaaaagaaatcaaagaagaaagttgaggaagaagaggaagatggggtgaatatggaaaactttcaggagttcatcagacaagcaagtgaggctgaactggaggaggtgttgactttttatacccaaaagaacaagtctgctagtgtcttcctggggactcactctaaaatttctaagaacaacaacaattattctgatagtggggcaaaaggtgatcaccctgagactataatggaagaagtgaaaataaagccacctaaacagcaacagacgacagaaattcattctgataaattatctcgatttaccacttcagcagaaaaagaggcaaaattagtttatagcaattcctcctctggtcctactgctactctgcagaaaattcccaacacccatttgtcatctgttacaacctctgacctctctccagggccttgccaccattcttctttatctcaaattccttcagctatccccagcatgcctcaccagccaacaattttactgaacacagtctctgccagtgcttctccctgcctacatcccggggcacagaacatcccaagccctactggcctgccacgctgtcgatcaggaagtcacaccattggtcccttttcttccttccaaagtgctgcacacatctatagccagaaactgtctcgtccctcttcagcaaaggcaggatcgtgctatctaaacaagcatcattcaggaatagccaaaacacaaaaagagggagaagatgcttctttatatagcaaacggtacaaccaaagtatggttacagctgaacttcagcggctagctgagaagcaggcagcgagacagtattctccatccagccacatcaacctcctcacccaacaggtaacaaacctgaatttggcaactggcatcataaacagaagcagtgcttcagctcccccaaccctccgacccatcatcagtcctagtggcccgacatggtctacacagtcagacccccaagctcccgagaatcactccagctctcctggaagcaggagcctgcagacagggggatttgcctgggaaggagaagtagaaaacaacgtgtacagccaggctacaggggtggtcccccagcacaagtatcaccccacagcaggcagctatcagcttcaatttgccctgcagcaacttgaacaacaaaaacttcagtcccggcagctcctggaccagagtcgagcccggcaccaggcaatctttggcagccagacactacctaactccaatttatggacaatgaataatggtgcaggttgtagaatttccagtgccacagctagtggccagaagccaaccactctgccacaaaaagtggtaccacctccaagttcttgcgcctccctggttcccaaacccccacccaaccacgaacaagtgctcagaagggcaacatcccagaaagcttccaaagggtcctccgcggaagggcagctgaatggactccagagcagccttaaccctgcagcctttgtgcccatcaccagctctacagatcctgctcacactaaaatatga

SEQ ID NO: 589 - DNA, 1800 bp, Homo sapiens
  source 1..1800: mol_type = genomic DNA
atggatggcagccggagagtcagagcaacctctgtccttcccagatatggtccaccgtgcctatttaaaggacacttgagcaccaaaagtaatgctttttgcactgactcctcttctctcagactaagcactctccagctggtcaagaatcacatggctgttcactataataaaatcctttcagccaaagctgcagtagactgctcggttccagtaagcgtgagtaccagcataaagtatgcagaccaacaacgaagagagaaactcaaaaaggaattagcacaatgtgaaaaagagttcaaattaactaaaactgcaatgcgagccaattataaaaataattccaagtcactttttaataccttacaaaagccctcaggcgaaccgcaaattgaggatgacatgttaaaagaagaaatgaatggattttcatcctttgcaaggtcactagtaccctcttcagagagactacacctaagtctacataaatccagtaaagtcatcacaaatggtcctgagaagaactccagttcctccccgtccagtgtggattatgcagcctccgggccccggaaactgagctctggagccctgtatggcagaaggcccagaagcacattcccaaattcccaccggtttcagttagtcatttcgaaagcacccagtggggatcttttggataaacattctgaactcttttctaacaaacaattgccattcactcctcgcactttaaaaacagaagcaaaatctttcctgtcacagtatcgctattatacacctgccaaaagaaaaaaggattttacagatcaacggatagaagctgaaacccagactgaattaagctttaaatctgagttggggacagctgagactaaaaacatgacagattcagaaatgaacataaagcaggcatctaattgtgtgacatatgatgccaaagaaaaaatagctcctttacctttagaagggcatgactcaacatgggatgagattaaggatgatgctcttcagcattcctcaccaagggcaatgtgtcagtattccctgaagcccccttcaactcgtaaaatctactctgatgaagaagaactgttgtatctgagtttcattgaagatgtaacagatgaaattttgaaacttggtttattttcaaacaggtttttagaacgactgttcgagcgacatataaaacaaaataaacatttggaggaggaaaaaatgcgccacctgctgcatgtcctgaaagtagacttaggctgcacatcggaggaaaactcggtaaagcaaaatgatgttgatatgttgaatgtatttgattttgaaaaggctgggaattcagaaccaaatgaattaaaaaatgaaagtgaagtaacaattcagcaggaacgtcaacaataccaaaaggctttggatatgttattgtcggcaccaaaggatgagaacgagatattcccttcaccaactgaatttttcatgcctatttataaatcaaagcattcagaaggggttataattcaacaggtgaatgatgaaacaaatcttgaaacttcaactttggatgaaaatcatccaagtatttcagacagtttaacagatcgggaaacttctgtgaatgtcattgaaggtgatagtgaccctgaaaaggttgagatttcaaatggattatgtggtcttaacacatcaccctcccaatctgttcagttctccagtgtcaaaggcgacaataatcatgacatggagttatcaactcttaaaatcatggaaatgagcattgaggactgccctttggatgtttaa

SEQ ID NO: 590 - DNA, 1548 bp, Homo sapiens
  source 1..1548: mol_type = genomic DNA
atgagctcggagatggagccgctgctcctggcctggagctattttaggcgcaggaagttccagctctgcgccgatctatgcacgcagatgctggagaagtccccttatgaccaggaaccagatcctgaattgccagtgcatcaggcagcttggatcttaaaagcaagagcgctaacagaaatggtatacatagatgaaattgatgtagatcaggaaggaattgcagaaatgatgctggatgaaaatgctatagctcaagttccacgccctggaacgtctttgaaactccctggaactaatcagacaggagggcctagccaggccgttaggccaatcacacaagctggaagacccattacaggtttcctcaggcccagcacgcagagtggaaggccaggcactatggaacaggctatcagaacacccagaaccgcctacacagcccgccctatcaccagctcctccggaagatttgtcaggctgggaacggcttccatgcttacaagtcctgatggaccatttataaatttatctaggctgaatttaacaaagtattcccagaaacctaagttggcaaaggctttgtttgagtatatctttcatcatgaaaatgatgttaagactgctttggatctggctgccctctccacagaacattctcagtacaaggactggtggtggaaagtacagattggaaaatgttactacaggttgggaatgtatcgtgaagcagaaaaacagtttaaatcagccctgaagcagcaggaaatggtagatacatttctgtacttggcaaaagtttatgtctcattggatcaacctgtgactgctttaaatcttttcaaacaaggcttagataagtttccaggagaagtaaccctgctctgtggaattgcaagaatctatgaggaaatgaacaatatgtcatcagcagcagaatattacaaagaagttttgaaacaagacaatactcatgtggaagccatcgcatgcattggaagcaaccacttctattctgatcagccagaaatagctctccggttttacaggcggctgctgcagatgggcatttataacggccagctttttaacaatctggggctgtgttgcttctatgcccagcagtatgatatgactctgacctcatttgaacgtgccctttctttggctgaaaatgaagaagaggcagctgatgtctggtacaacttgggacatgtagctgtgggaataggagatacaaatttggcccatcagtgcttcaggctggctctggtcaacaacaacaaccacgccgaggcctacaacaacctggctgtgctggagatgcggaagggccacgttgaacaggcaagggcactattacaaactgcatcatcattagcaccccatatgtatgaaccgcattttaattttgcaacaatctctgataagattggagatctgcagagaagctatgttgctgcgcagaagtctgaagcagcatttccagaccatgtggacacacaacatttaattaaacaattaaggcagcattttgctatgctctga

SEQ ID NO: 591 - DNA, 1347 bp, Homo sapiens
  source 1..1347: mol_type = genomic DNA
atgccaggaataaaaaggatactcactgttaccattctggctctctgtcttccaagccctgggaatgcacaggcacagtgcacgaatggctttgacctggatcgccagtcaggacagtgtttagatattgatgaatgccgaaccatccccgaggcctgccgaggagacatgatgtgtgttaaccaaaatggcgggtatttatgcattccccggacaaaccctgtgtatcgagggccctactcgaacccctactcgaccccctactcaggtccgtacccagcagctgccccaccactctcagctccaaactatcccacgatctccaggcctcttatatgccgctttggataccagatggatgaaagcaaccaatgtgtggatgtggacgagtgtgcaacagattcccaccagtgcaaccccacccagatctgcatcaatactgaaggcgggtacacctgctcctgcaccgacggatattggcttctggaaggccagtgcttagacattgatgaatgtcgctatggttactgccagcagctctgtgcgaatgttcctggatcctattcttgtacatgcaaccctggttttaccctcaatgaggatggaaggtcttgccaagatgtgaacgagtgtgccaccgagaacccctgcgtgcaaacctgcgtcaacacctacggctctttcatctgccgctgtgacccaggatatgaacttgaggaagatggcgttcattgcagtgatatggacgagtgcagcttctctgagttcctctgccaacatgagtgtgtgaaccagcccggcacatacttctgctcctgccctccaggctacatcctgctggatgacaaccgaagctgccaagacatcaacgaatgtgagcacaggaaccacacgtgcaacctgcagcagacgtgctacaatttacaagggggcttcaaatgcattgaccccatccgctgtgaggagccttatctgaggatcagtgataaccgctgtatgtgtcctgctgagaaccctggctgcagagaccagccctttaccatcttgtaccgggacatggacgtggtgtcaggacgctccgttcccgctgacatcttccaaatgcaagccacgacccgctaccctggggcctattacattttccagatcaaatctgggaatgagggcagagaattttacatgcggcaaacgggccccatcagtgccaccctggtgatgacacgccccatcaaagggccccgggaaatccagctggacttggaaatgatcactgtcaacactgtcatcaacttcagaggcagctccgtgatccgactgcggatatatgtgtcgcagtacccattctga

SEQ ID NO: 592 - DNA, 4812 bp, Homo sapiens
  source 1..4812: mol_type = genomic DNA
atgaaagactctaacaggtgttgctgtggccagttcaccaaccagcatatcccccctctgccaagtgcaacacccagcaaaaatgaagaggaaagcaaacaggtggagactcagcctgagaaatggtctgttgccaagcacacccagagctacccaacagattcctatggagttcttgaattccagggtggcggatattccaataaagccatgtatatccgtgtatcctatgacaccaagccagactcactgctccatctcatggtgaaagattggcagctggaactccccaagctcttaatatctgtgcatggaggcctccagaactttgagatgcagcccaagctgaaacaagtctttgggaaaggcctgatcaaggctgctatgaccaccggggcctggatcttcaccgggggtgtcagcacaggtgttatcagccacgtaggggatgccttgaaagaccactcctccaagtccagaggccgggtttgtgctataggaattgctccatggggcatcgtggagaataaggaagacctggttggaaaggatgtaacaagagtgtaccagaccatgtccaaccctctaagtaagctctctgtgctcaacaactcccacacccacttcatcctggctgacaatggcaccctgggcaagtatggcgccgaggtgaagctgcgaaggctgctggaaaagcacatctccctgcagaagatcaacacaagactggggcagggcgtgcccctcgtgggtctcgtggtggaggggggccctaacgtggtgtccatcgtcttggaatacctgcaagaagagcctcccatccctgtggtgatttgtgatggcagcggacgtgcctcggacatcctgtcctttgcgcacaagtactgtgaagaaggcggaataataaatgagtccctcagggagcagcttctagttaccattcagaaaacatttaattataataaggcacaatcacatcagctgtttgcaattataatggagtgcatgaagaagaaagaactcgtcactgtgttcagaatgggttctgagggccagcaggacatcgagatggcaattttaactgccctgctgaaaggaacaaacgtatctgctccagatcagctgagcttggcactggcttggaaccgcgtggacatagcacgaagccagatctttgtctttgggccccactggccgcccctgggaagcctggcacccccgacggacagcaaagccacggagaaggagaagaagccacccatggccaccaccaagggaggaagaggaaaagggaaaggcaagaagaaagggaaagtgaaagaggaagtggaggaagaaactgacccccggaagatagagctgctgaactgggtgaatgctttggagcaagcgatgctagatgctttagtcttagatcgtgtcgactttgtgaagctcctgattgaaaacggagtgaacatgcaacactttctgaccattccgaggctggaggagctttataacacaagactgggtccaccaaacacacttcatctgctggtgagggatgtgaaaaagagcaaccttccgcctgattaccacatcagcctcatagacatcgggctcgtgctggagtacctcatgggaggagcctaccgctgcaactacactcggaaaaactttcggaccctttacaacaacttgtttggaccaaagaggcctaaagctcttaaacttctgggaatggaagatgatgagcctccagctaaagggaagaaaaagaaaaagaagaaaaaggaggaagagatcgacattgatgtggacgaccctgccgtgagtcggttccagtatcccttccacgagctgatggtgtgggcagtgctgatgaaacgccagaaaatggcagtgttcctctggcagcgaggggaagagagcatggccaaggccctggtggcctgcaagctctacaaggccatggcccacgagtcctccgagagtgatctggtggatgacatctcccaggacttggataacaattccaaagacttcggccagcttgctttggagttattagaccagtcctataagcatgacgagcagatcgctatgaaactcctgacctacgagctgaaaaactggagcaactcgacctgcctcaaactggccgtggcagccaaacaccgggacttcattgctcacacctgcagccagatgctgctgaccgatatgtggatgggaagactgcggatgcggaagaaccccggcctgaaggttatcatggggattcttctaccccccaccatcttgtttttggaatttcgcacatatgatgatttctcgtatcaaacatccaaggaaaatgaggatggcaaagaaaaagaagaggaaaatacggatgcaaatgcagatgctggctcaagaaagggggatgaggagaacgagcacaaaaaacagagaagtattcccatcggaacaaagatctgtgaattctataacgcgcccattgtcaagttctggttttacacaatatcatacttgggctacctgctgctgtttaactacgtcatcctggtgcggatggatggctggccgtccctccaggagtggatcgtcatctcctacatcgtgagcctggcgttagagaagatacgagagatcctcatgtcagaaccaggcaaactcagccagaaaatcaaagtttggcttcaggagtactggaacatcacagatctcgtggccatttccacattcatgattggagcaattcttcgcctacagaaccagccctacatgggctatggccgggtgatctactgtgtggatatcatcttctggtacatccgtgtcctggacatctttggtgtcaacaagtatctggggccatacgtgatgatgattggaaagatgatgatcgacatgctgtactttgtggtcatcatgctggtcgtgctcatgagtttcggagtagcccgtcaagccattctgcatccagaggagaagccctcttggaaactggcccgaaacatcttctacatgccctactggatgatctatggagaggtgtttgcagaccagatagacctctacgccatggaaattaatcctccttgtggtgagaacctatatgatgaggagggcaagcggcttcctccctgtatccccggcgcctggctcactccagcactcatggcgtgctatctactggtcgccaacatcctgctggtgaacctgctgattgctgtgttcaacaataccttctttgaagtaaaatcaatatccaaccaggtgtggaagttccagcgatatcagctgattatgacatttcatgacaggccagtcctgcccccaccgatgatcattttaagccacatctacatcatcattatgcgtctcagcggccgctgcaggaaaaagagagaaggggaccaagaggaacgggatcgtggattgaagctcttccttagcgacgaggagctaaagaggctgcatgagttcgaggagcagtgcgtgcaggagcacttccgggagaaggaggatgagcagcagtcgtccagcgacgagcgcatccgggtcacttctgaaagagttgaaaatatgtcaatgaggttggaagaaatcaatgaaagagaaacttttatgaaaacttccctgcagactgttgaccttcgacttgctcagctagaagaattatctaacagaatggtgaatgctcttgaaaatcttgcgggaatcgacaggtctgacctgatccaggcacggtcccgggcttcttctgaatgtgaggcaacgtatcttctccggcaaagcagcatcaatagcgctgatggctacagcttgtatcgatatcattttaacggagaagagttattatttgaggatacatctctctccacgtcaccagggacaggagtcaggaaaaaaacctgttccttccgtataaaggaagagaaggacgtgaaaacgcacctagtcccagaatgtcagaacagtcttcacctttcactgggcacaagcacatcagcaaccccagatggcagtcaccttgcagtagatgacttaaagaacgctgaagagtcaaaattaggtccagatattgggatttcaaaggaagatgatgaaagacagacagactctaaaaaagaagaaactatttccccaagtttaaataaaacagatgtgatacatggacaggacaaatcagatgttcaaaacactcagctaacagtggaaacgacaaatatagaaggcactatttcctatcccctggaagaaaccaaaattacacgctatttccccgatgaaacgatcaatgcttgtaaaacaatgaagtccagaagcttcgtctattcccggggaagaaagctggtcggtggggttaaccaggatgtagagtacagttcaatcacggaccagcaattgacgacggaatggcaatgccaagttcaaaagatcacgcgctctcatagcacagatattccttacattgtgtcggaagctgcagtgcaagctgagcataaagagcagtttgcagatatgcaagatgaacaccatgtcgctgaagcaattcctcgaatccctcgcttgtccctaaccattactgacagaaatgggatggaaaacttactgtctgtgaagccagatcaaactttgggattcccatctctcaggtcaaaaagtttacatggacatcctaggaatgtgaaatccattcagggaaagttagacagatctggacatgccagtagtgtaagcagcttagtaattgtgtctggaatgacagcagaagaaaaaaaggttaagaaagagaaagcttccacagaaactgaatgctag

SEQ ID NO: 593 - DNA, 2004 bp, Homo sapiens
  source 1..2004: mol_type = genomic DNA
atgatccacgaactgctcttggctctgagcgggtaccctgggtccattttcacctggaacaagcggagtggcctgcaggtatcgcaggacttccctttcctccaccccagtgagaccagtgtcctgaatcgactctgccggctcggcacagactatattcgcttcactgagttcattgaacagtacacgggccatgtgcaacagcaggatcaccatccatctcaacagggccaaggtgggttacatggaatctacctgcgggccttctgcacagggctggattctgttttgcagccttatcgccaagcactgcttgatttggaacaagagttcctgggtgatccccatctctccatatcacatgtcaactacttcctagaccagttccagcttctttttccctctgtgatggttgtagtagaacaaattaaaagtcaaaagattcatggttgtcaaatcctggaaacagtctacaaacacagctgtggggggttgcctcctgttcgaagtgcactggaaaaaatcctggccgtttgtcatggggtcatgtataaacagctctcagcctggatgctccatggactcctcttggaccagcatgaagaattctttatcaaacaggggccatcttctggtaatgtcagtgcccagccagaagaggacgaggaggatctgggcattgggggactgacaggaaaacaactgagagaactgcaggacttgcgcctgattgaggaagagaacatgctggcaccatctctgaagcagttttccctacgagtggagattttgccatcctacattccagtgagggttgctgaaaaaatcctatttgttggagaatctgtccagatgtttgagaatcaaaatgtgaacctgactagaaaaggatccattttgaaaaaccaggaagacacttttgctgcagagctgcaccgtctcaagcagcagccactcttcagcttggtggactttgaacaggtggtggatcgcattcgcagcactgtggctgagcatctctggaagttgatggtagaagaatccgatttactgggtcagctgaagatcattaaagacttttaccttctgggacgtggagaactgtttcaggccttcattgacacagctcaacacatgttgaaaacaccacccactgcagtaactgagcatgatgtgaatgtggcctttcaacagtcagcacacaaggtattgctagatgatgacaaccttctccctctgttgcacttgacaatcgagtatcacggaaaggagcacaaagcagatgctactcaggcaagagaagggccttctcgggaaacttctccccgggaagcccctgcatctggctgggcagccctaggtctttcctacaaagtacagtggccactacatattctcttcaccccagctgtcctggaaaagtacaatgttgtttttaagtacttactgagtgtgcgccgggtgcaagctgagctgcagcactgctgggccctacaaatgcagcgcaagcacctcaagtcgaaccagactgatgcaatcaagtggcgcctaagaaatcacatggcatttttggtggataatcttcagtactatctccaggtagatgtgttggagtctcagttctcccagctgcttcatcagatcaattctacccgagactttgaaagcatccgattggctcatgaccacttcctgagcaatttgctggctcaatcctttatcctattgaaacctgtgtttcactgcctgaatgaaatcctagatctctgtcacagtttttgttcgctggtcagtcagaacctaggcccactggatgagcgtggagccgcccagctgagcattctcgtgaagggctttagccgccagtcttcactcctgttcaagattctctccagtgttcggaatcatcagatcaactcagatttggctcaactactgttacgactagattataacaaatactatacccaggctggtggaactctgggcagtttcgggatgtga

SEQ ID NO: 594 - DNA, 3300 bp, Homo sapiens
  source 1..3300: mol_type = genomic DNA
atggggaaattgatcaggatggggccgcaagagaggtggttactccggacaaagcggcttcattggagtcgcctcctcttcttactgggaatgttgatcatcggttctacttatcagcaccttaggagaccccggggcctttcctcattgtgggcagcagtctcttctcatcagcctataaaactggccagtcgggacctctccagtgaagagatgatgatgatgagcagcagcccttcaaaacctagctccgaaatggggggtaagatgctggtaccccaagcctcagtgggcagtgatgaagcaacactgagcatgacagtggagaatatccccagtatgcctaaaagaacagccaagatgatcccaacaacaaccaagaataattacagcccaacagcagcaggtacagaaagaaggaaggaagacaccccaacatccagtagaacactgacttactacacctcaacttcaagcagacaaatagtaaaaaagtataccccaacacccaggggagaaatgaagagctacagcccaactcaagtgagggaaaaggtgaagtatactccttccccacgtggtagaagagtaggcacttacgtgccgtccacattcatgacaatggaaacaagccatgcgatcacccccaggacaacagtgaaagacagtgacattacagcaacctataaaatactcgaaaccaactctcttaagagaataatggaggaaaccaccccaaccactctcaagggaatgtttgatagcaccccaacttttctgacacatgaggtagaagcaaacgtcttgacttctccaaggagcgtcatggaaaaaaacaacctgtttccccccagaagagtggaaagtaacagctcagcccatccctgggggttagtgggaaagagcaacccgaagactccccagggaacagtcctgttgcataccccagccacctctgaggggcaggtgacaataagcaccatgacaggcagcagcccagcagaaaccaaagccttcactgctgcctggagtcttaggaatccttcacccaggaccagtgtatcagccatcaaaacagccccagccatagtctggaggctggcaaagaaaccttccacagcacccagcacctcaacaacccctacggtcagggcaaagctgaccatgcaggtccatcactgtgtggttgtgaagccaaccccagccatgctcaccactccctccccaagcctcacaacagccctgctcccagaggagctcagtcctagtccctcagtgctgcctcccagcttgccagacctccaccccaagggagagtaccccccagatctgttcagtgtggaggagcggcggcagggctgggtggtcctgcacgtttttggcatgatgtatgtgtttgtggccttggccattgtttgcgacgagtacttcgttccagccctgggtgtcatcacagacaagctgcagatctccgaggatgtggcaggcgccacattcatggctgctggaggctctgctcctgagctcttcacctccctcatcggtgtcttcatttcccacagcaacgtgggcattggtaccattgtgggctctgctgtgttcaacattctctttgtcattggcacttgttccctcttctcccgagagatcctcaacctcacctggtggcccttattccgtgatgtctccttctacatccttgacctgataatgctcatcctcttcttcctggacagcctcattgcctggtgggagagcctgctgctgctgctggcctatgccttctatgtgttcaccatgaagtggaacaagcatatcgaggtctgggtgaaggagcagctcagcaggaggccagtggccaaggtcatggccttagaagacctcagcaagccgggcgatggggccattgcggtggatgagctacaggataacaagaagctgaagctcccgtccttgctgacccgagggagcagctcgacctctctgcacaacagcaccatccgcagcaccatctaccagctcatgctccacagcctggaccccctgagggaagttcgccttgccaaggagaaggaggaggagagcttgaatcaaggggccagagcccaaccccaggccaaagcagaaagcaaaccagaagaggaggagccagccaagctccctgcggtcacggtcacaccagcccctgttccagacatcaagggagatcagaaggagaatccaggcggtcaggaagatgtggctgaggccgagagcacaggtgaaatgccaggcgaagagggcgaaactgctggtgaaggtgaaactgaagagaaaagtggaggtgaaactcaaccagaaggtgaaggtgaaactgaaacacaaggaaaaggagaagaatgtgaagatgaaaatgaagcagaaggaaaaggagacaatgaaggtgaagatgagggtgaaatccacgcagaagatggtgaaatgaaaggtaatgaaggtgaaactgaaagccaggaactcagtgctgaaaatcacggtgaagccaaaaatgatgagaaaggtgtagaagatggagggggaagtgatggaggggatagcgaagaggaggaagaggaggaggaagagcaggaggaagaggaggaggaggaagagcaggaggaagaggaggaggaggaggaggaagaggaggagaagggaaatgaagagcctctgtccctggactggcctgaaaccaggcagaagcaggccatttacctcttccttctgcccatcgtgttcccactgtggctgacagtccccgacgtccgaaggcaggagtctaggaagttttttgttttcaccttcctgggatctatcatgtggatagccatgttctcatacctcatggtgtggtgggctcaccaggttggtgaaacaatagggatttctgaagagatcatgggcctgacaatccttgcagcaggcacatcaattcctgacctcatcaccagtgtgattgtcgctcgaaaaggcctgggagacatggctgtgtcaagctctgtgggcagtaacatatttgatatcactgtgggcttgcctgttccttggttgcttttctctcttatcaatggattacagccagttccagtcagcagcaatggcttgttttgtgcaattgttttgctttttctcatgcttctgtttgtgatctcttcaattgcgtcatgtaaatggagaatgaacaagatcctgggcttcacaatgttcctcctttactttgtattcctgataatcagtgtgatgttagaagatcgaatcatatcctgtcctgtatctgtctga

SEQ ID NO: 595 - DNA, 1233 bp, Homo sapiens
  source 1..1233: mol_type = genomic DNA
atggagaccagaccaacagctctgatgagctccacagtggctgcagctgcgcctgcagctggggctgcctccaggaaggagtctccaggcagatggggcctgggggaggatcccacaggcgtgagcccctcgctccagtgccgcgtgtgcggagacagcagcagcgggaagcactatggcatctatgcctgcaacggctgcagcggcttcttcaagaggagcgtacggcggaggctcatctacaggtgccaggtgggggcagggatgtgccccgtggacaaggcccaccgcaaccagtgccaggcctgccggctgaagaagtgcctgcaggcggggatgaaccaggacgccgtgcagaacgagcgccagccgcgaagcacagcccaggtccacctggacagcatggagtccaacactgagtcccggccggagtccctggtggctcccccggccccggcagggcgcagcccacggggccccacacccatgtctgcagccagagccctgggccaccacttcatggccagccttataacagctgaaacctgtgctaagctggagccagaggatgctgatgagaatattgatgtcaccagcaatgaccctgagttcccctcctctccatactcctcttcctccccctgcggcctggacagcatccatgagacctcggctcgcctactcttcatggccgtcaagtgggccaagaacctgcctgtgttctccagcctgcccttccgggatcaggtgatcctgctggaagaggcgtggagtgaactctttctcctcggggccatccagtggtctctgcctctggacagctgtcctctgctggcaccgcccgaggcctctgctgccggtggtgcccagggccggctcacgctggccagcatggagacgcgtgtcctgcaggaaactatctctcggttccgggcattggcggtggaccccacggagtttgcctgcatgaaggccttggtcctcttcaagccagagacgcggggcctgaaggatcctgagcacgtagaggccttgcaggaccagtcccaagtgatgctgagccagcacagcaaggcccaccaccccagccagcccgtgaggtttgggaaattgctcctgctcctcccgtctttgaggtttatcactgcggaacgcatcgagctcctctttttccgcaagaccatagggaatactccaatggagaagctcctttgtgatatgttcaaaaactag

SEQ ID NO: 596 - DNA, 1560 bp, Homo sapiens
  source 1..1560: mol_type = genomic DNA
atggctgaggagagagtcgcgacgagaactcaatttcctgtatctactgagtctcaaaaaccccggcagaaaaaagctccagagtttcctattttggagaagcagaactggttgattcatcttcattatatccggaaagattatgaagcctgcaaggctgttatcaaagaacagcttcaagagactcagggattgtgtgaatatgctatctatgtccaagcattgatatttcgcctagaaggaaatatccaagaatccctagaactcttccagacatgtgcagttcttagtcctcagagtgctgataacctcaagcaggtggccagatctttatttcttttgggaaaacataaagctgccattgaagtatataatgaagcagctaaactcaaccagaaagattgggagatcagccataacctaggagtttgctacatatacctgaagcagttcaacaaggcacaagaccagttgcacaatgccctgaatcttaataggcacgatctgacttatataatgctggggaagatccacttgctggagggagacttggacaaggccattgaagtctacaagaaagcagtggagttctcaccagaaaatacagagcttcttacaactttaggattactctacttacagctcggcatttaccagaaggcatttgaacatcttggcaatgcactgacttatgaccctaccaactacaaggccatcttggcagcaggcagcatgatgcagacccacggggactttgatgttgccctcaccaaatacagagttgtggcttgtgctgttccagaaagtcctccactctggaataacattggaatgtgtttctttggcaagaagaaatatgtggcggccatcagctgcctgaaacgagccaactacttggcaccctttgattggaagattctgtataatttgggccttgtccatttgaccatgcagcagtatgcatcagcttttcattttctcagtgcggccatcaacttccagccaaagatgggggagctctacatgctcttggcagtggctctgaccaatctggaagatatagaaaatgccaagagagcctacgcagaagcagtccacctggataagtgtaaccctttagtaaacctgaactatgctgtgctgctgtacaaccagggcgagaagaagaacgccctggcccaatatcaggagatggagaagaaagtcagcctactcaaggacaatagctctctggaatttgactctgagatggtggagatggctcagaagttgggagctgctctccaggttggggaggcactggtctggaccaaaccagttaaagatcccaaatcaaagcaccagaccacttcaaccagcaaacctgccagtttccagcagcctctgggctctaatcaagctctaggacaggcaatgtcttcagcagctgcatacaggacgctcccctcaggtgctggaggaacatcccagttcacaaagcccccatctcttcctctggagccagagcctgcggtggaatcaagtccaactgaaacatcagaacaaataagagagaaataa

SEQ ID NO: 597 - DNA, 564 bp, Homo sapiens
  source 1..564: mol_type = genomic DNA
atggggaacaagcagaccatcttcaccgaagagcagctagacaactaccaggactgcaccttcttcaataagaaggacatcctcaagctgcattcgcgattctatgagctggcccccaacctcgtcccaatggactacaggaagagccccatcgtccacgtgcccatgagcctcatcatccagatgccagagctccgggagaatcccttcaaagaaaggatcgtggcggcgttttccgaggatggtgaggggaacctcactttcaacgactttgtggacatgttttccgtgctctgcgagtcggctccccgagagctcaaggcaaactatgccttcaagatctatgacttcaacactgacaacttcatctgcaaggaggacctggagctgacgctggcccggctcactaagtcagagctggatgaggaggaggtggtgcttgtgtgcgacaaggtcattgaggaggctgacttggacggtgacggcaagctgggctttgctgacttcgaggacatgattgccaaggcccctgacttcctcagcactttccacatccggatctga

SEQ ID NO: 598 - DNA, 954 bp, Homo sapiens
  source 1..954: mol_type = genomic DNA
atgtcagaaggggtgggcacgttccgcatggtacctgaagaggaacaggagctccgtgcccaactggagcagctcacaaccaaggaccatggacctgtctttggcccgtgcagccagctgccccgccacaccttgcagaaggccaaggatgagctgaacgagagagaggagacccgggaggaggcagtgcgagagctgcaggagatggtgcaggcgcaggcggcctcgggggaggagctggcggtggccgtggcggagagggtgcaagagaaggacagcggcttcttcctgcgcttcatccgcgcacggaagttcaacgtgggccgtgcctatgagctgctcagaggctatgtgaatttccggctgcagtaccctgagctctttgacagcctgtccccagaggctgtccgctgcaccattgaagctggctaccctggtgtcctctctagtcgggacaagtatggccgagtggtcatgctcttcaacattgagaactggcaaagtcaagaaatcacctttgatgagatcttgcaggcatattgcttcatcctggagaagctgctggagaatgaggaaactcaaatcaatggcttctgcatcattgagaacttcaagggctttaccatgcagcaggctgctagtctccggacttcagatctcaggaagatggtggacatgctccaggattccttcccagcccggttcaaagccatccacttcatccaccagccatggtacttcaccacgacctacaatgtggtcaagcccttcttgaagagcaagctgcttgagagggtctttgtccacggggatgacctttctggtttctaccaggagatcgatgagaacatcctgccctctgacttcgggggcacgctgcccaagtatgatggcaaggccgttgctgagcagctctttggcccccaggcccaagctgagaacacagccttctga

SEQ ID NO: 599 - DNA, 918 bp, Homo sapiens
  source 1..918: mol_type = genomic DNA
atggcggcggggctggcgcggctcctgttgctcctcgggctctcggccggcgggcccgcgccggcaggtgcagcgaagatgaaggtggtggaggagcccaacgcgtttggggtgaacaacccgttcttgcctcaggccagtcgcctccaggccaagagggatccttcacccgtgtctggacccgtgcatctcttccgactctcgggcaagtgcttcagcctggtggagtccacgtacaagtatgagttctgcccgttccacaacgtgacccagcacgagcagaccttccgctggaacgcctacagtgggatcctcggcatctggcacgagtgggagatcgccaacaacaccttcacgggcatgtggatgagggacggtgacgcctgccgttcccggagccggcagagcaaggtggagctggcgtgtggaaaaagcaaccggctggcccatgtgtccgagccgagcacctgcgtctacgcgctgacgttcgagacccccctcgtctgccacccccacgccttgctagtgtacccaaccctgccagaggccctgcagcggcagtgggaccaggtagagcaggacctggccgatgagctgatcaccccccagggccatgagaagttgctgaggacactttttgaggatgctggctacttaaagaccccagaagaaaatgaacccacccagctggagggaggtcctgacagcttggggtttgagaccctggaaaactgcaggaaggctcataaagaactctcaaaggagatcaaaaggctgaaaggtttgctcacccagcacggcatcccctacacgaggcccacagaaacttccaacttggagcacttgggccacgagacgcccagagccaagtctccagagcagctgcggggtgacccaggactgcgtgggagtttgtga

SEQ ID NO: 600 - DNA, 4389 bp, Homo sapiens
  source 1..4389: mol_type = genomic DNA
atggccctctattatgaccaccagatagaagccccggatgcagcagggtcaccctcatttatcagctggcaccctgtccatccattcttggcagttgcttacatcagcacaacctcaacaggcagcgtggatatttacctggagcaaggggagtgcgtgccagatacacacgtcgagaggccgttccgggttgcttccctgtgctggcacccgacgcggctggtgctggctgtgggctgggagactggagaagtgacggtgtttaacaagcaggacaaggagcagcacacgatgcccctgacacacacagccgacatcaccgtgctccgttggagccccagtggaaactgcctgctgtctggggacaggcttggtgtcttgctcttgtggaggttggaccaaaggggccgagtgcaagggacgcctctgctgaaacacgagtatgggaaacacctcacgcactgcatcttccggctcccccctcctggcgaggacctggttcagttggcaaaggcagctgtgagcggtgatgagaaagccctggacatgtttaactggaagaagagcagttctggaagtttgctgaagatggggtctcacgaggggctgttgttctttgtcagtctgatggacgggacagtgcactatgtggatgagaagggcaagaccactcaggtggtgtccgcagacagcacgattcagatgctgttctacatggagaagagggaggcactggtggtggtcacagagaacctccggctgtccctgtacacggtgcctcctgagggcaaagcagaagaagtgatgaaggtcaagctgagcgggaaaaccggccgccgggcagacatcgctttgattgaaggcagccttctcgtgatggccgtcggggaggctgccctcagattctgggacatagaacgaggagagaattatatactgagtccagatgagaagtttggctttgagaaaggagagaatatgaactgtgtgtgttactgtaaagtcaaaggtcttctggccgctggtaccgacagagggcgagtagccatgtggaggaaagtaccagacttcctgggcagccccggggcagagggcaaggacaggtgggcccttcagacccctaccgagctccaaggaaacatcacgcaaatccagtggggttccaggaagaacctgctggcagtgaacagcgtcatctccgtggccatcctcagcgagcgggccatgtcgtcacacttccaccagcaagtggccgccatgcaggtctccccgagtctgctgaatgtgtgcttcctgtccacgggggtcgcacacagcctgcgcaccgacatgcacatcagtggagtgtttgccaccaaggatgctgtcgcagtctggaacggaaggcaggtggcgatcttcgagctttctggagccgcgatacggagtgcagggaccttcttgtgtgagacgcctgtgttagcaatgcatgaagaaaacgtttacacggtggagtcaaaccgagttcaagttcgaacctggcaggggactgtcaaacaactcctccttttctcggagactgaggggaatccctgcttcttggacatctgtgggaatttcctggttgtagggacagacttggctcactttaaaagctttgatctttcccgaagagaggccaaagcacactgtagctgcaggagcctggcggagctggtccctggggtggggggcatcgcttctctgcggtgcagcagcagcgggagcaccatcagcatcctccccagcaaggctgacaacagccctgattccaaaatctgcttctacgatgttgaaatggacacagtgaccgtctttgacttcaagactggacaaattgatcggagagagacgctgtcctttaatgagcaagagactaataagagccacctctttgtggatgagggactgaaaaattatgttcccgtgaaccacttctgggaccagagtgagccccggctgtttgtatgcgaagccgtgcaggagacgccgcgctcccagcctcagtctgcaaacgggcagccccaagatgggcgcgctggccctgcggcagatgttttgatcctgtccttcttcatttccgaagagcacggcttcctgcttcatgagagcttcccccggcctgccacctcccacagtctcctggggatggaagtgccttattactacttcacaagaaagcccgaagaagcagacagagaagacgaggtggagcctgggtgccaccacatccctcagatggtgtccaggagacccctgcgagactttgtggggctggaggactgcgacaaggccacccgggacgccatgctccacttcagcttctttgtcaccataggagacatggacgaagccttcaaatccatcaagctcatcaaaagtgaggccgtctgggagaacatggcgcgcatgtgcgtgaagacccagcggctggacgtggccaaggtgtgcctggggaacatgggccatgcccgcggggcccgagcgctgcgtgaggcggagcaggagccggagctagaggcccgcgtggccgtgctggccacgcagctgggcatgctggaggacgccgagcagctgtacaggaagtgcaagcgccacgacctcctgaacaagttctaccaggctgcgggccggtggcaggaggccctccaggtagccgagcaccacgatcgcgtgcacctgcgcagcacctaccaccgctatgccgggcacctggaggccagcgccgactgcagccgggccctcagttactacgagaagtcggacacgcaccgcttcgaggtgcccaggatgctgtcggaggacctgccgtccctggagctctacgtgaataaaatgaaggataagaccctgtggcggtggtgggcgcagtacctggagagccagggcgagatggacgccgcgctgcactactacgagctggcccgggaccacttctccctggtccgcatccactgcttccagggcaatgtccagaaggctgcgcaaatagccaacgagacaggaaacctggcggcctcctaccacctcgcccgccagtacgagagccaggaggaggtcgggcaggcggtgcacttctacacccgggcacaggccttcaagaatgccatccgcctgtgcaaggagaacggcctggacgaccagctcatgaacttggccctgctgagctcccccgaggacatgatcgaggcggcccgatactacgaggagaagggcgtgcagatggacagggcggtcatgctgtaccacaaggctggccacttctccaaggccctggagctggcctttgccacccagcagtttgtggccctacagctcatagcagaggacctggatgagacgtcagaccctgcgctcctggcccgctgctccgacttcttcatcgagcacagtcagtacgagagggcggtagagctgctgctggctgccaggaagtatcaggaagccctgcagctgtgcctggggcagaacatgagcatcaccgaggagatggcggaaaagatgaccgtggccaaggactcctcggacctgcctgaggagtcgcggcgggagctgctggagcagatagcagactgctgcatgcgccagggcagctaccacctggccaccaagaagtacacgcaggccggcaacaagctgaaggccatgagggcgctgctcaaatccggagacacggagaaaatcacgttcttcgcgagcgtgtccaggcagaaggaaatctacatcatggctgctaactacctgcagtccctggactggcggaaggagccggagatcatgaagaacatcatcggcttctacaccaaggggcgggccctggacctcctggctggcttttatgacgcttgtgcccaggtggagattgatgaataccagaactacgacaaagcccacggggcgctgaccgaggcctacaagtgcctggccaaggccaaggccaagagccccctggaccaggagaccaggctggcgcagctgcagagcaggatggcactggtgaagaggttcatccaggcccgcaggacgtacacagaggaccccaaggagtccatcaagcagtgtgagctgctcctggaggaaccagacctggacagcaccatccgcatcggggacgtctatggcttcctggtggagcactacgtgcggaaggaggaataccagacggcctacagattcctggaggagatgcggcggcggcttcccttggccaacatgtcctactacgtgagcccgcaggccgtggacgccgtgcaccgggggctgggtctcccactgccacgcaccgtccccgagcaggtccgccacaacagcatggaggacgccagggagctggacgaggaggtggtggaagaggcagatgacgacccctga

SEQ ID NO: 601 - DNA, 1242 bp, Homo sapiens
  source 1..1242: mol_type = genomic DNA
atgtctttccgcgacctccgcaatttcacagagatgatgagagccctgggataccctcgacatatttctatggaaaatttccgtacacccaattttggacttgtatctgaagtgcttctctggcttgtgaaaagatatgagccccagactgacatcccgcctgacgtggatactgaacaggaccgagttttcttcattaaggcaattgcccagttcatggccaccaaggcacatataaaactcaacactaagaagctttatcaagcagatgggtatgcggtaaaagagctgctgaagatcacatctgtcctttataatgctatgaagaccaaggggatggagggctctgaaatagtagaggaagatgtcaacaagttcaagtttgatcttggctcaaagattgcagatttgaaggcagccaggcagcttgcgtctgaaatcacctccaaaggagcatctctgtatgacttgctcggcatggaagtagagttgagggaaatgagaacagaagccattgccagacctctggaaataaacgagactgaaaaagtgatgagaattgcaataaaagagattttgacacaggttcagaagactaaagacctgctcaataatgtggcctctgatgaagctaatttagaagccaaaatcgaaaagagaaaattagaactggaaagaaatcggaagcgactagagactctgcagagtgtcaggccatgttttatggatgagtatgagaagactgaggaagaattacaaaagcagtatgacacttatctggagaaatttcaaaatctgacttatctggaacaacagcttgaagaccatcataggatggagcaagaaaggtttgaggaagctaaaaacactctctgcctgatacagaacaagctcaaggaggaagagaagcgcctgctcaagagtggaagtaacgatgactcggacatagacatccaggaggacgatgaatccgacagtgagttggaagaaaggcggctgcccaagccacagacagccatggagatgctcatgcaaggaagacctggcaaacgcattgtgggcacgatgcaaggtggagactccgatgacaatgaggactcggaggagagtgaaattgacatggaagatgatgatgacgaggatgacgatttggaagacgagagcatttctctctcaccaaccaagcccaatcgaagggtccggaaatctgaacccctggatgagagtgacaatgacttctga

SEQ ID NO: 602 - DNA, 4512 bp, Homo sapiens
  source 1..4512: mol_type = genomic DNA
atggccgcgcctgctgagccctgcgcggggcagggggtctggaaccagacagagcctgaacctgccgccaccagcctgctgagcctgtgcttcctgagaacagcaggggtctgggtaccccccatgtacctctgggtccttggtcccatctacctcctcttcatccaccaccatggccggggctacctccggatgtccccactcttcaaagccaagatggtgcttggattcgccctcatagtcctgtgtacctccagcgtggctgtcgctctttggaaaatccaacagggaacgcctgaggccccagaattcctcattcatcctactgtgtggctcaccacgatgagcttcgcagtgttcctgattcacaccgagaggaaaaagggagtccagtcatctggagtgctgtttggttactggcttctctgctttgtcttgccagctaccaacgctgcccagcaggcctccggagcgggcttccagagcgaccctgtccgccacctgtccacctacctatgcctgtctctggtggtggcacagtttgtgctgtcctgcctggcggatcaaccccccttcttccctgaagacccccagcagtctaacccctgtccagagactggggcagccttcccctccaaagccacgttctggtgggtttctggcctggtctggaggggatacaggaggccactgagaccaaaagacctctggtcgcttgggagagaaaactcctcagaagaacttgtttcccggcttgaaaaggagtggatgaggaaccgcagtgcagcccggaggcacaacaaggcaatagcatttaaaaggaaaggcggcagtggcatgaaggctccagagaccgagcccttcctacggcaagaagggagccagtggcgcccactgctgaaggccatctggcaggtgttccattctaccttcctcctggggaccctcagcctcatcatcagtgatgtcttcaggttcactgtccccaagctgctcagccttttcctggagtttattggtgatcccaagcctccagcctggaagggctacctcctcgccgtgctgatgttcctctcagcctgcctgcaaacgctgtttgagcagcagaacatgtacaggctcaaggtgctgcagatgaggttgcggtcggccatcactggcctggtgtacagaaaggtcctggctctgtccagcggctccagaaaggccagtgcggtgggtgatgtggtcaatctggtgtccgtggacgtgcagcggctgaccgagagcgtcctctacctcaacgggctgtggctgcctctcgtctggatcgtggtctgcttcgtctatctctggcagctcctggggccctccgccctcactgccatcgctgtcttcctgagcctcctccctctgaatttcttcatctccaagaaaaggaaccaccatcaggaggagcaaatgaggcagaaggactcacgggcacggctcaccagctctatcctcaggaactcgaagaccatcaagttccatggctgggagggagcctttctggacagagtcctgggcatccgaggccaggagctgggcgccttgcggacctccggcctcctcttctctgtgtcgctggtgtccttccaagtgtctacatttctggtcgcactggtggtgtttgctgtccacactctggtggccgagaatgctatgaatgcagagaaagcctttgtgactctcacagttctcaacatcctcaacaaggcccaggctttcctgcccttctccatccactccctcgtccaggcccgggtgtcctttgaccgtctggtcaccttcctctgcctggaagaagttgaccctggtgtcgtagactcaagttcctctggaagcgctgccgggaaggattgcatcaccatacacagtgccaccttcgcctggtcccaggaaagccctccctgcctccacagaataaacctcacggtgccccagggctgtctgctggctgttgtcggtccagtgggggcagggaagtcctccctgctgtccgccctccttggggagctgtcaaaggtggaggggttcgtgagcatcgagggtgctgtggcctacgtgccccaggaggcctgggtgcagaacacctctgtggtagagaatgtgtgcttcgggcaggagctggacccaccctggctggagagagtactagaagcctgtgccctgcagccagatgtggacagcttccctgagggaatccacacttcaattggggagcagggcatgaatctctccggaggccagaagcagcggctgagcctggcccgggctgtatacagaaaggcagctgtgtacctgctggatgaccccctggcggccctggatgcccacgttggccagcatgtcttcaaccaggtcattgggcctggtggactactccagggaacaacacggattctcgtgacgcacgcactccacatcctgccccaggctgattggatcatagtgctggcaaatggggccatcgcagagatgggttcctaccaggagcttctgcagaggaagggggccctcatgtgtcttctggatcaagccagacagccaggagatagaggagaaggagaaacagaacctgggaccagcaccaaggaccccagaggcacctctgcaggcaggaggcccgagcttagacgcgagaggtccatcaagtcagtccctgagaaggaccgtaccacttcagaagcccagacagaggttcctctggatgaccctgacagggcaggatggccagcaggaaaggacagcatccaatacggcagggtgaaggccacagtgcacctggcctacctgcgtgccgtgggcacccccctctgcctctacgcactcttcctcttcctctgccagcaagtggcctccttctgccggggctactggctgagcctgtgggcggacgaccctgcagtaggtgggcagcagacgcaggcagccctgcgtggcgggatcttcgggctcctcggctgtctccaagccattgggctgtttgcctccatggctgcggtgctcctaggtggggcccgggcatccaggttgctcttccagaggctcctgtgggatgtggtgcgatctcccatcagcttctttgagcggacacccattggtcacctgctaaaccgcttctccaaggagacagacacggttgacgtggacattccagacaaactccggtccctgctgatgtacgcctttggactcctggaggtcagcctggtggtggcagtggctaccccactggccactgtggccatcctgccactgtttctcctctacgctgggtttcagagcctgtatgtggttagctcatgccagctgagacgcttggagtcagccagctactcgtctgtctgctcccacatggctgagacgttccagggcagcacagtggtccgggcattccgaacccaggccccctttgtggctcagaacaatgctcgcgtagatgaaagccagaggatcagtttcccgcgactggtggctgacaggtggcttgcggccaatgtggagctcctggggaatggcctggtgtttgcagctgccacgtgtgctgtgctgagcaaagcccacctcagtgctggcctcgtgggcttctctgtctctgctgccctccaggtgacccagacactgcagtgggttgttcgcaactggacagacctagagaacagcatcgtgtcagtggagcggatgcaggactatgcctggacgcccaaggaggctccctggaggctgcccacatgtgcagctcagcccccctggcctcagggcgggcagatcgagttccgggactttgggctaagataccgacctgagctcccgctggctgtgcagggcgtgtccttcaagatccacgcaggagagaaggtgggcatcgttggcaggaccggggcagggaagtcctccctggccagtgggctgctgcggctccaggaggcagctgagggtgggatctggatcgacggggtccccattgcccacgtggggctgcacacactgcgctccaggatcagcatcatcccccaggaccccatcctgttccctggctctctgcggatgaacctcgacctgctgcaggagcactcggacgaggctatctgggcagccctggagacggtgcagctcaaagccttggtggccagcctgcccggccagctgcagtacaagtgtgctgaccgaggcgaggacctgagcgtgggccagaaacagctcctgtgtctggcacgtgcccttctccggaagacccagatcctcatcctggacgaggctactgctgccgtggaccctggcacggagctgcagatgcaggccatgctcgggagctggtttgcacagtgcactgtgctgctcattgcccaccgcctgcgctccgtgatggactgtgcccgggttctggtcatggacaaggggcaggtggcagagagcggcagcccggcccagctgctggcccagaagggcctgttttacagactggcccaggagtcaggcctggtctga

SEQ ID NO: 603 - DNA, 945 bp, Homo sapiens
  source 1..945: mol_type = genomic DNA
atgagccgggtaccagcgttcctgagcgcggccgaggtggaggaacacctccgcagctccagcctcctcatcccgcctctagagacggccctggccaacttctccagcggtcccgaaggaggggtcatgcagcccgtgcgcaccgtggtgccggtgaccaagcacaggggctacctgggggtcatgcccgcctacagtgctgcagaggatgcactgaccaccaagttggtcaccttctacgaggaccgcggcatcacctcggtcgtcccttcccaccaggctactgtgctactctttgagcccagcaatggcaccctgctggcggtcatggatggaaatgtcataactgcaaagagaacagctgcagtttctgccattgccaccaagtttctgaaacctcccagcagtgaagtgctgtgcatccttggggctggggtccaggcctacagccattatgagatcttcacagagcagttctcctttaaggaggtgaggatatggaaccgcaccaaagaaaatgcagagaagtttgcagacacagtgcaaggagaggtacgggtctgttcttcggtccaggaggctgtggcaggtgcagatgtgatcatcacagtcaccctggcaacagagcccattttgtttggtgaatgggtgaagccaggggctcacatcaatgctgttggagccagcagacctgactggagagaactggatgatgagctcatgaaagaagctgtgctgtacgtggattcccaggaggctgccctgaaggagtctggagatgtcctgctgtcaggggccgagatctttgctgagctgggagaagtgattaagggagtgaaaccagcccactgtgagaagaccaccgtgttcaagtctttgggaatggcagtggaagacacagttgcagccaaactcatctatgattcctggtcatctggtaaataa

SEQ ID NO: 604 - DNA, 1317 bp, Homo sapiens
  source 1..1317: mol_type = genomic DNA
atgggaggctgtgcaggctcgcggcggcgcttttcggattccgagggggaggagaccgtcccggagccccggctccctctgttggaccatcagggcgcgcattggaagaacgcggtgggcttctggctgctgggcctttgcaacaacttctcttatgtggtgatgctgagtgccgcccacgacatccttagccacaagaggacatcgggaaaccagagccatgtggacccaggcccaacgccgatcccccacaacagctcatcacgatttgactgcaactctgtctctacggctgctgtgctcctggcggacatcctccccacactcgtcatcaaattgttggctcctcttggccttcacctgctgccctacagcccccgggttctcgtcagtgggatttgtgctgctggaagcttcgtcctggttgccttttctcattctgtggggaccagcctgtgtggtgtggtcttcgctagcatctcatcaggccttggggaggtcaccttcctctccctcactgccttctaccccagggccgtgatctcctggtggtcctcagggactgggggagctgggctgctgggggccctgtcctacctgggcctcacccaggccggcctctcccctcagcagaccctgctgtccatgctgggtatccctgccctgctgctggccagctatttcttgttgctcacatctcctgaggcccaggaccctggaggggaagaagaagcagagagcgcagcccggcagcccctcataagaaccgaggccccggagtcgaagccaggctccagctccagcctctcccttcgggaaaggtggacagtgttcaagggtctgctgtggtacattgttcccttggtcgtagtttactttgccgagtatttcattaaccagggactttttgaactcctctttttctggaacacttccctgagtcacgctcagcaataccgctggtaccagatgctgtaccaggctggcgtctttgcctcccgctcttctctccgctgctgtcgcatccgtttcacctgggccctggccctgctgcagtgcctcaacctggtgttcctgctggcagacgtgtggttcggctttctgccaagcatctacctcgtcttcctgatcattctgtatgaggggctcctgggaggcgcagcctacgtgaacaccttccacaacatcgccctggagaccagtgatgagcaccgggagtttgcaatggcggccacctgcatctctgacacactggggatctccctgtcggggctcctggctttgcctctgcatgacttcctctgccagctctcctga

SEQ ID NO: 605 - DNA, 3855 bp, Homo sapiens
  source 1..3855: mol_type = genomic DNA
atgcataagaagagggttgaagagggggaggcctcagacttctcgctggcctgggattcctccgtgacagcagcaggaggcctagaaggagagccagagtgcgatcagaaaaccagccgtgcgctggaagacaggaacagcgtgacaagtcaagaggagagaaatgaggatgatgaagacatggaggatgaatcaatttacacctgcgatcactgtcagcaggacttcgagtctctggcagacctgacggaccaccgggcccaccgctgtcctggagatggtgatgacgacccacaactctcctgggtggcctcgtctccctccagcaaggatgttgcgtcacccacgcagatgatcggagatggttgtgacctcggcctcggcgaggaggaagggggcacgggcctgccatacccttgccagttctgcgacaagtccttcatccgcttgagctacttgaagaggcacgagcagatccacagcgacaagctgccgttcaagtgcacctactgcagccgcctcttcaagcacaagaggagccgtgaccggcacatcaagctgcatacgggcgacaagaagtatcactgccacgagtgcgaggcagccttctcccgcagcgaccacctcaagatccacctgaagacccacagctccagcaagcccttcaagtgcactgtgtgcaagcgcggcttctcctccaccagctcgctgcagagccacatgcaggcccacaaaaagaacaaggagcatctggccaagtcggagaaggaagccaagaaggacgacttcatgtgcgactactgcgaggacaccttcagccagacggaggagctggagaagcacgtgctcacccgccacccgcagctgtccgagaaggcggacctgcagtgcattcactgccctgaggtcttcgtcgacgagaacacactgctcgcccatatccaccaagcccacgccaaccagaaacacaagtgccccatgtgccctgagcagttctcctcagtggaaggtgtctactgccacctggacagccaccggcagcccgactccagcaaccacagtgtcagtcccgaccctgtactgggcagcgtggcctccatgagcagcgccacacccgactccagcgcctctgtggagcgtggctccaccccggactccaccttgaagccgctgcgggggcagaagaagatgcgggatgacgggcagggctggaccaaggtggtctatagctgcccctattgttccaagcgggactttaacagcctggccgtgctggagatccacctgaagaccatccacgcggacaagccccagcagagccacacatgtcagatctgcctggactccatgcccaccctctacaacctcaacgagcacgttcgcaagctgcacaagaaccatgcctaccctgtgatgcagtttggcaacatctctgccttccactgcaactactgccccgagatgttcgccgacatcaatagcctgcaggagcacatccgcgtctcccactgcggccccaacgccaacccctctgacggtaataatgctttcttctgcaaccagtgctccatgggtttccttactgagtcctccctcaccgagcacatccagcaggcccactgcagtgtgggcagtgccaaactagagtctccggtggtgcagcccacgcagtccttcatggaggtctattcctgcccctactgcaccaactcccccatctttggctccatcctgaaactcaccaagcacatcaaggagaaccacaagaacattccactggcccacagcaagaagtccaaggccgagcagagcccagtctcgtccgatgtggaggtgtcttccccgaagcggcagcggctctcagcaagcgccaactccatctccaatggggagtatccttgcaatcaatgcgacctcaagttctccaactttgagagcttccagacccacctgaagctgcacctggagctgctgctgcggaagcaagcgtgcccccagtgcaaagaggactttgactcccaggagtccctcctgcagcacctgacagtgcattacatgaccacgtcgacccactatgtgtgcgagagctgcgacaagcaattttcctcggtggatgacctgcagaagcacctgctggacatgcacacctttgtgttgtaccactgcaccctgtgtcaggaggtcttcgactccaaggtgtccatccaggtgcacctggcggtgaagcacagcaatgagaagaagatgtaccgctgcacggcctgcaactgggacttccgcaaggaggctgacctgcaggtgcacgtcaaacacagccacctgggcaacccggccaaggctcacaagtgcatcttctgtggggagaccttcagcaccgaggtggagctgcagtgccacatcaccacacacagcaagaagtataactgtaagttctgcagcaaggccttccacgccatcatcctgctggagaagcacctgcgggagaagcactgtgtgtttgatgctgcgaccgagaacggcacggccaatggggtacccccaatggccaccaagaaagctgagcctgctgacctgcagggcatgctgcttaagaaccctgaggcacctaacagccatgaggccagcgaggatgacgtggacgcgtcggagcccatgtacggctgtgacatctgtggggcggcctacaccatggaggtgctgctgcagaatcaccggctgcgggaccacaatatccggccgggcgaggatgatggctcacgcaagaaggctgagtttatcaagggcagtcacaagtgcaacgtttgttcacggactttcttctcggagaacgggctacgggagcacctgcagacgcaccggggccctgccaagcactacatgtgtcccatctgtggtgagcgcttcccttcgctgctgacgctcaccgaacacaaggtgacccacagcaagagcctggacacgggcacctgtcgcatctgcaagatgcccctgcagagcgaggaggagtttattgagcactgccagatgcaccctgacctgcgcaactcactcacgggcttccgctgtgtggtctgcatgcagacagtcacttccacgcttgagctcaagatccatggcaccttccacatgcagaagctggcgggcagctcagcggcgtcctcccccaatggccaggggctgcagaagctctacaagtgcgccctgtgcctcaaggagttccgcagcaagcaggacctggtgaagcttgacgtcaatgggctgccctacggcctctgcgccggctgcatggcccgcagcgccaacggacaggtgggtggcctggccccgcccgagcccgccgaccggccctgtgccggcctccgttgccccgagtgcagtgtcaagtttgagagtgccgaagacctggagagccacatgcaggtggaccaccgtgacctcacgccggagaccagtgggccccggaaaggcacccagacatcgccagtgccccggaaaaagacataccagtgcatcaagtgccagatgaccttcgagaacgagagagagatccaaatccacgttgccaaccacatgattgaggaaggcatcaaccacgagtgtaagctgtgcaaccagatgttcgactccccggccaagctcctctgtcacctcattgagcacagcttcgagggcatgggcggcaccttcaaatgccccgtgtgtttcacagtcttcgtccaggccaacaagttgcagcagcacatctttgccgtgcacgggcaggaggacaagatctacgactgctcacagtgccctcagaagttcttcttccagaccgagctgcagaaccacacgatgagccagcacgcacagtga

SEQ ID NO: 606 - DNA, 3948 bp, Homo sapiens
  source 1..3948: mol_type = genomic DNA
atgtctggtccaactgatgagactgcaggagacttgcctgtgaaagatacaggtctaaacctctttggaatgggagggttacaagaaacttcaacaacacggacaatgaagtctcgccaggcagtgtcacgtgtcagtcgtgaggaactggaagacagatttttgcgtttgcatgatgagaacattttacttaaacagcatgcccgcaagcaggaggataaaattaaaagaatggccaccaagttaatacggctagttaatgacaagaaaagatatgagcgggttggtggcggccccaagcggctgggacgagatgtggaaatggaagaaatgattgagcagctgcaagagaaagttcatgagcttgaaaaacaaaatgaaaccctcaaaaacagactgatttcagccaaacagcaacttcaaacccagggttacaggcaaactccatacaataatgtacaatctcgtattaacactgggcgtagaaaagcaaatgaaaatgctggtttacaggaatgccccaggaaaggtataaaattccaagatgcagatgtagcagaaactccacatcccatgtttacaaaatatggcaacagtttacttgaagaagccagaggagaaataagaaatttagaaaacgttattcagtcacaaagaggccagatagaggagttagagcacttggctgagatcctgaaaactcagttgaggagaaaagaaaatgaaattgagttatctcttcttcagcttcgagaacagcaagctacagatcaaaggtcaaatattcgggacaatgtagaaatgattaagcttcataaacagctagtagagaaaagcaatgctctttcagcaatggaaggaaaatttattcagcttcaagagaagcaaagaactctcagaatcagccacgatgctttgatggcaaatggggatgaattaaacatgcaacttaaagagcagcgtttaaaatgctgcagtcttgagaaacaattacattctatgaagttttctgaaagaagaatagaagagctgcaggatagaattaatgatttagaaaaggaacgggaacttttaaaggaaaactatgataaactttatgacagtgccttcagtgctgcccatgaagagcaatggaagttaaaggagcaacagctgaaagtgcagattgctcagctcgagactgccttgaagtctgacttaacagacaaaactgaaatccttgacagattaaaaactgaaagagatcaaaatgaaaaactcgttcaagagaatagagaactacagttacagtatctggaacaaaagcaacaacttgatgaacttaaaaaacgcataaaattgtacaaccaggagaatgatattaatgctgatgaattgagtgaagctctcctacttataaaggctcaaaaagaacaaaaaaatggagacctttcctttttagtgaaagtagatagtgaaattaataaagatctagaacgctctatgagagagctgcaagcaactcatgcagaaacggtgcaagagctggaaaagacaagaaacatgctaattatgcaacacaaaattaataaagattatcagatggaggttgaggcagtgacccgtaagatggaaaatttgcagcaagattatgaactcaaagtggaacagtatgttcatcttcttgatatcagggctgcacgtatccataaactagaagcccaattaaaggatattgcctatggcaccaagcagtacaaatttaaaccagaaatcatgccagatgactctgttgatgaatttgatgaaaccatccacttagaacgaggcgaaaatctatttgaaatccatatcaacaaagtaaccttttcttctgaagttttacaggcatctggagataaagagcctgtcactttctgtacctatgctttctatgattttgaactacagacaactcccgtagtgcgaggccttcatcccgaatataacttcacttctcaatatcttgttcatgttaatgacttatttttgcaatatattcagaagaatactatcacccttgaggtccaccaggcttatagcacagaatatgaaacaattgcagcatgtcaattaaaatttcacgaaattcttgaaaaaagcggccgaatattttgtacagcaagtttgattggaacaaaaggagacatcccaaattttggcacagtggaatactggttccgattaagagttcccatggatcaagcaattcgactttatcgagaaagggcaaaggctttggggtatataacatcaaattttaaggggccagagcatatgcagtcgttaagtcagcaagcacccaaaactgctcaactcagttctacagattccacagatggcaacttaaatgaacttcacattacaataagatgttgcaaccacctgcagtcccgagcaagccacctgcagccacacccatatgttgtgtacaagttttttgattttgcagaccatgatacagctatcattcccagtagcaatgatccacagtttgatgatcatatgtatttcccagtgccaatgaatatggacttggatcgataccttaagtcagagtctctgagtttttatgtttttgatgatagtgatacccaggagaatatttacataggaaaagtcaatgtgcctctgatttcgttggcacatgacaggtgtatctcaggaatatttgagttaacagaccatcaaaagcatcctgctggcaccatccatgttatattgaaatggaaatttgcttaccttccaccaagtggatcaataacaactgaagacttaggaaatttcattcgcagcgaagagccagaagttgttcaaagacttcctccagcatcctctgttagcacactagttttagcaccaagacctaaaccaagacaacgtttaacacctgtagataagaaggtatctttcgtggatatcatgccacatcagagtgatgagacttctcctcctcctgaagataggaaggaaatttcaccagaggtagagcatataccagaaatagaaattaatatgctgactgttccacatgttcccaaggtttcacaagaaggcagtgtagatgaggtaaaagagaatactgagaaaatgcagcaaggaaaagatgatgtgtctttactatctgaaggtcagcttgcagaacaaagcttggcatcttctgaagatgaaacagaaataacagaggacttggaaccagaagttgaagaggacatgtcagcttctgacagtgatgactgtattattccaggtcctatctccaagaatatcaaacagagtctcgcattgtctcccgggctggggtgcagtagcgcgatctcagctcactgcaacttccgcctcccgggttccagcgattttcctgcctcagcctcccaagtagatgggattacaggtgcctgccaccacacccagccatcagaaaaaattcggattgagatcatagctctaagccttaatgattctcaagtaaccatggatgacactatccaacggctgtttgttgagtgtcgattctacagtcttcctgctgaagagacacccgtgtcacttccaaaacccaagagtgggcagtgggtctactataactatagcaatgtgatctacgtggataaagaaaacaacaaagcaaagagagacatcttaaaagctatactacaaaaacaagagatgcctaatagaagccttcgcttcaccgtggtcagtgaccctccagaggacgagcaggacctggagtgtgaggacattggcgtggctcacgtcgaccttgccgacatgtttcaggaagggagggacctcattgagcaaaatatcgatgtttttgatgcacgagcagatggtgaaggtattggcaagctcagggtaacagtcgaagctctccatgccctccagtctgtctacaagcaatacagagatgacttggaggcttga

SEQ ID NO: 607 - DNA, 2166 bp, Homo sapiens
  source 1..2166: mol_type = genomic DNA
atgctgctgcctgtgttcaccctgaaactgcgccacaaaatcagcccccgaatggtggccatagggcgctacgacgggactcacccgtgcctggcggccgccacccaaacgggcaaggtttttattcataatcctcatacacggaaccagcatgtcagtgcatccagggtcttccagagccccctggaatctgatgtttctcttctcagcattaaccaggcagtcagctgtctgactgcaggcgtattgaaccctgagcttggctatgatgcccttttagtggggacacagactaatcttttggcttatgatgtctacaataattcggatttgttctacagagaggtagcagatggggcaaatgcaattgtgctggggacattgggagacatttcttcccctcttgcgattattggtggcaattgtgctctgcaaggtttcaatcatgaaggaagtgatctcttttggacggttactggagacaatgttaattccttggccttgtgtgactttgatggtgatggaaagaaagagcttcttgttggatctgaggattttgatatccgagtttttaaggaagatgagattgtggcagaaatgacagaaacagagatagtcacctctctttgtcccatgtatggcagtcgatttggttatgccctttccaatggcacagttggagtttatgacaaaacatcccgatactggagaattaaatcgaaaaatcatgccatgagcattcatgcttttgaccttaattctgatggagtgaatgaactgataactggttggtccaatgggaaggttgatgctcgaagtgaccgaactggggaggtcatctttaaggacaatttttcttctgcaattgccggtgtggtagagggagattaccggatggatggccacatacagttaatctgctgctcagtggatggggaaatccggggctacctgcctggcacggctgagatgaggggcaacctcatggacaccagtgcagagcaggacctgatccgagagctgagtcagaagaagcagaatctgttgctggaactccgtaactatgaggaaaatgccaaggctgaattggccagtccactgaacgaggctgatgggcatcggggcataatcccagccaataccaggctccacaccacgctctcagtcagcctggggaatgagacccaaactgctcatacagaattacgcatttccacttctaatgacaccatcatccgagcagtattgatttttgcagaaggaatttttacaggtgaaagccacgtggtacatcccagcattcacaacctctccagttccatctgcatccctattgtgcctcccaaagatgtccctgtggatctgcacttgaaggcattcgtgggttacagaagcagcacccagtttcatgtatttgaatcgacaagacagctccctcgattctccatgtatgcgctgaccagcctggaccctgccagtgagccaatcagttatgttaactttaccattgcagaacgggcacagagggttgttgtatggctcggtcagaactttctgttaccagaagacactcacattcagaatgctccatttcaagtgtgtttcacatctttacggaatggcggccacctgcatataaaaataaaacttagtggagagatcactataaatactgatgatattgatttggctggtgatatcatccagtcaatggcatcattttttgctattgaagaccttcaagtagaagcggattttcctgtctattttgaggaattacgaaaggtgctagttaaggtggatgaatatcattcagtgcatcagaagctcagtgctgatatggctgatcattctaatttgatccgaagtttgctggtcggagctgaggatgctcgtctgatgagggacatgaaaacaatgaagagtcgttatatggaactctatgaccttaatagagacttgctaaatggatataaaattcgctgtaacaatcacacagagctgttgggaaacctcaaagcagtaaatcaagcaattcaaagagcaggtcgtctgcgggttggaaaaccaaagaaccaggtgatcactgcttgtcgggatgcaattcgaagcaataacatcaacacactgttcaaaatcatgcgagtggggacagcttcttcctag

SEQ ID NO: 608 - DNA, 492 bp, Homo sapiens
  source 1..492: mol_type = genomic DNA
atggacgccttagaaggagagagctttgcgctgtctttctcctccgcctctgatgcagaatttgatgctgtggttggatatttagaggacattatcatggatgacgagttccagttattacagagaaatttcatggacaagtactacctggagtttgaagacacagaagagaataaactcatctacacacctatttttaatgaatacatttctttggtagaaaaatacattgaagaacagctgctgcagcggattcctgagttcaacatggcagccttcaccacaacattacagcaccataaggatgaagtggctggtgacatattcgacatgctgctcaccttcacagattttctggcttttaaagaaatgtttttggactacagagcagaaaaagaaggccgaggactggacttaagcagtggcttagtggtgacttcattgtgcaaatcatcttctctgccagcttcccagaacaatctgcggcactag

SEQ ID NO: 609 - DNA, 3756 bp, Homo sapiens
  source 1..3756: mol_type = genomic DNA
atgttgggctgggtccagagggtgctgcctcagcccccagggacccctcggaagaccaagatgcaggaggaagaggaagtggaaccagagccagagatggaggcggaggtggaaccagaaccgaatcctgaggaggccgagacagagtccgagtccatgccccccgaagagtcattcaaggaggaggaagtggctgtggcagacccaagccctcaggagaccaaggaggctgcccttacttccaccatatccctccgggcccagggcgctgagatttctgaaatgaatagtcccagccgcagggtactgacctggctcatgaagggcgtagagaaggtgatcccgcagcctgttcacagcatcacggaggacccggctcagatcctggggcatggcagcactggggacacagggtgcacagatgaacccaatgaggcccttgaggcccaagacactaggcctgggctgcggctgcttctgtggctggagcagaatctggaaagagtgcttcctcagccccccaaatcctctgaggtctggagagatgagcctgcagttgctacaggtgctgcctcagacccagcgcctccaggacgcccccaggaaatggggcccaagctgcaggcccgggagaccccctccctgcccacacccatccccctgcagcccaaggaggaacccaaggaggcaccagctccagagccccagcccggctcccaggcccagacctcctccctgccaccaaccagggaccctgccaggctggtggcatgggtcctgcacaggctggagatggccttgccgcagccagtgctacatgggaaaataggggaacaggagcctgactcccctgggatatgtgatgtgcagaccatcagcatccttcctggaggacaagtggagcctgaccttgtcctagaggaggttgaaccgccctgggaggatgcccaccaggatgtcagtaccagcccacagggtacagaggtggttccagcttatgaagaagagaacaaagctgtggagaagatgcccagagagctgtcccggattgaagaggagaaagaagatgaggaggaggaagaggaagaggaggaggaggaggaagaggaggaggtgactgaggtgctgctggatagctgtgtggtgtcgcaggtgggcgtgggccagagtgaagaagacgggacccggccccagagcacttcagatcagaagctgtgggaggaagttggggaggaggccaagaaggaggctgaagagaaggccaaggaggaggccgaggaggtggctgaagaggaggctgaaaaggagccccaggactgggcggagaccaaggaggagcctgaggctgaggccgaggctgccagttcaggagtgcctgccacgaaacagcacccagaagtgcaggtggaagatactgatgctgatagctgccccctcatggcagaagagaatccaccctcaaccgtgttgccgccaccgtctcctgccaaatcagacacccttatagtcccaagctcagcctcggggacacacaggaagaagctgccctctgaggatgatgaggctgaagagctcaaggcgttgtcaccagcagagtccccagtggttgcctggtctgaccccaccaccccgaaggacactgatggccaggaccgtgcggcctccacggccagcacaaatagcgccatcatcaacgaccggctccaggagctggtgaagctcttcaaggagcggacagagaaagtgaaggagaaactcattgaccctgacgtcacctctgatgaggagagccccaagccctccccagccaagaaagccccagagccagctccagacacaaagcccgctgaagccgagccagtggaagaggagcactattgcgacatgctctgctgcaagttcaaacaccgcccctggaagaagtaccagtttccccagagcattgacccgctgaccaacctgatgtatgtcctatggctgttcttcgtggtgatggcctggaattggaactgttggctgattcccgtgcgctgggccttcccctaccagaccccggacaacatccaccactggctgctgatggattacctatgcgacctcatctacttcctggacatcaccgtgttccagacacgcctgcagtttgtcagaggcggggacatcattacggacaaaaaggacatgcgaaataactacctgaagtctcgccgcttcaagatggacctgctcagcctcctgcccttggattttctctatttgaaagtcggtgtgaaccccctcctccgcctgccccgctgtttaaagtacatggccttcttcgagtttaacagccgcctggaatccatcctcagcaaagcctacgtgtacagggtcatcaggaccacagcctaccttctctacagcctgcatttgaattcctgtctttattactgggcatcggcctatcagggcctcggctccactcactgggtttacgatggcgtgggaaacagttatattcgctgttactactttgctgtgaagaccctcatcaccatcggggggctgcctgaccccaagacactctttgaaattgtcttccagctgctgaattatttcacgggcgtctttgctttctctgtgatgatcggacagatgagagatgtggtaggggccgccaccgccggacagacctactaccgcagctgcatggacagcacggtgaagtacatgaatttctacaagatccccaagtccgtgcagaaccgcgtcaagacctggtacgagtacacctggcactcgcaaggcatgctggatgagtcagagctgatggtgcagcttccagacaagatgcggctggacctcgccatcgacgtgaactacaacatcgttagcaaagtcgcactctttcagggctgtgaccggcagatgatctttgacatgctgaagaggcttcgctctgttgtctacctgcccaacgactatgtgtgcaagaagggggagatcggccgtgagatgtacatcatccaggcagggcaagtgcaggtcttgggcggccctgatgggaaatctgtgctggtgacgctgaaagctggatctgtgtttggagaaataagcttgctggctgttgggggcgggaaccggcgcacggccaacgtggtggcgcacgggtttaccaacctcttcatcctggataagaaggacctgaatgagattttggtgcattatcctgagtctcagaagttactccggaagaaagccaggcgcatgctgagaagcaacaataagcccaaggaggagaagagcgtgctgatccttccaccccgggcgggcaccccaaagctcttcaacgctgccctcgctatgacaggaaagatgggtggcaagggggcaaaaggcggcaaacttgctcacctccgggcccggctcaaagaactggccgcgctggaggcggctgcaaagcagcaagagttggtggaacaggccaagagctcgcaagacgtcaagggagaggaaggctccgccgccccagaccagcacacgcacccaaaggaggccgccaccgacccacccgcgccccggacgccccccgagcccccggggtctccaccgagctctccaccgcctgcctcccttgggaggccggagggagaggaggaggggccggccgagcccgaagagcactcggtgaggatctgcatgagcccgggcccggagccgggagagcagatcctgtcggtgaagatgccggaggaaagggaggagaaggcggagtaa

SEQ ID NO: 610 - DNA, 2490 bp, Homo sapiens
  source 1..2490: mol_type = genomic DNA
atggggctccctcgtggacctctcgcgtctctcctccttctccaggtttgctggctgcagtgcgcggcctccgagccgtgccgggcggtcttcagggaggctgaagtgaccttggaggcgggaggcgcggagcaggagcccggccaggcgctggggaaagtattcatgggctgccctgggcaagagccagctctgtttagcactgataatgatgacttcactgtgcggaatggcgagacagtccaggaaagaaggtcactgaaggaaaggaatccattgaagatcttcccatccaaacgtatcttacgaagacacaagagagattgggtggttgctccaatatctgtccctgaaaatggcaagggtcccttcccccagagactgaatcagctcaagtctaataaagatagagacaccaagattttctacagcatcacggggccgggggcagacagcccccctgagggtgtcttcgctgtagagaaggagacaggctggttgttgttgaataagccactggaccgggaggagattgccaagtatgagctctttggccacgctgtgtcagagaatggtgcctcagtggaggaccccatgaacatctccatcatcgtgaccgaccagaatgaccacaagcccaagtttacccaggacaccttccgagggagtgtcttagagggagtcctaccaggtacttctgtgatgcaggtgacagccacggatgaggatgatgccatctacacctacaatggggtggttgcttactccatccatagccaagaaccaaaggacccacacgacctcatgttcaccattcaccggagcacaggcaccatcagcgtcatctccagtggcctggaccgggaaaaagtccctgagtacacactgaccatccaggccacagacatggatggggacggctccaccaccacggcagtggcagtagtggagatccttgatgccaatgacaatgctcccatgtttgacccccagaagtacgaggcccatgtgcctgagaatgcagtgggccatgaggtgcagaggctgacggtcactgatctggacgcccccaactcaccagcgtggcgtgccacctaccttatcatgggcggtgacgacggggaccattttaccatcaccacccaccctgagagcaaccagggcatcctgacaaccaggaagggtttggattttgaggccaaaaaccagcacaccctgtacgttgaagtgaccaacgaggccccttttgtgctgaagctcccaacctccacagccaccatagtggtccacgtggaggatgtgaatgaggcacctgtgtttgtcccaccctccaaagtcgttgaggtccaggagggcatccccactggggagcctgtgtgtgtctacactgcagaagaccctgacaaggagaatcaaaagatcagctaccgcatcctgagagacccagcagggtggctagccatggacccagacagtgggcaggtcacagctgtgggcaccctcgaccgtgaggatgagcagtttgtgaggaacaacatctatgaagtcatggtcttggccatggacaatggaagccctcccaccactggcacgggaacccttctgctaacactgattgatgtcaatgaccatggcccagtccctgagccccgtcagatcaccatctgcaaccaaagccctgtgcgccaggtgctgaacatcacggacaaggacctgtctccccacacctcccctttccaggcccagctcacagatgactcagacatctactggacggcagaggtcaacgaggaaggtgacacagtggtcttgtccctgaagaagttcctgaagcaggatacatatgacgtgcacctttctctgtctgaccatggcaacaaagagcagctgacggtgatcagggccactgtgtgcgactgccatggccatgtcgaaacctgccctggaccctggaagggaggtttcatcctccctgtgctgggggctgtcctggctctgctgttcctcctgctggtgctgcttttgttggtgagaaagaagcggaagatcaaggagcccctcctactcccagaagatgacacccgtgacaacgtcttctactatggcgaagaggggggtggcgaagaggaccaggactatgacatcacccagctccaccgaggtctggaggccaggccggaggtggttctccgcaatgacgtggcaccaaccatcatcccgacacccatgtaccgtcctcggccagccaacccagatgaaatcggcaactttataattgagaacctgaaggcggctaacacagaccccacagccccgccctacgacaccctcttggtgttcgactatgagggcagcggctccgacgccgcgtccctgagctccctcacctcctccgcctccgaccaagaccaagattacgattatctgaacgagtggggcagccgcttcaagaagctggcagacatgtacggtggcggggaggacgactag

SEQ ID NO: 611 - DNA, 3684 bp, Homo sapiens
  source 1..3684: mol_type = genomic DNA
atgggggacaccagtgaggatgcctcgatccatcgattggaaggcactgatctggactgtcaggttggtggtcttatttgcaagtccaaaagtgcggccagcgagcagcatgtcttcaaggctcctgctccccgcccttcattactcggactggacttgctggcttccctgaaacggagagagcgagaggagaaggacgatggggaggacaagaagaagtccaaagtctcctcctacaaggactgggaagagagcaaggatgaccagaaggatgctgaggaagagggcggtgaccaggctggccaaaatatccggaaagacagacattatcggtctgctcgggtagagactccatcccatccgggtggtgtgagcgaagagttttgggaacgcagtcggcagagagagcgggagcggcgggaacatggtgtctatgcctcgtccaaagaagaaaaggattggaagaaggagaaatcgcgggatcgagactatgaccgcaagagggacagagatgagcgggatagaagtaggcacagcagcagatcagagcgagatggagggtcagagcgtagcagcagaagaaatgaacccgagagcccacgacatcgacctaaagatgcagccaccccttcaaggtctacctgggaggaagaggacagtggctatggctcctcaaggcgctcacagtgggaatcgccctccccgacgccttcctatcgggattctgagcggagccatcggctgtccactcgagatcgagacaggtctgtgaggggcaagtactcggatgacacgcctctgccaactccctcctacaaatataacgagtgggccgatgacagaagacacttggggtccaccccgcgtctgtccaggggccgaggaagacgtgaggagggcgaagaaggaatttcatttgacacggaggaggagcggcagcagtgggaagatgaccagaggcaagccgatcgggattggtacatgatggacgagggctatgacgagttccacaacccgctggcctactcctccgaggactacgtgaggaggcgggagcagcacctgcataaacagaagcagaagcgcatttcagctcagcggagacagatcaatgaggataacgagcgctgggagacaaaccgcatgctcaccagtggggtggtccatcggctggaggtggatgaggactttgaagaggacaacgcggccaaggtgcatctgatggtgcacaatctggtgcctccctttctggatgggcgcattgtcttcaccaagcagccggagccggtgattccagtgaaggatgctacttctgacctggccatcattgctcggaaaggcagccagacagtgcggaagcacagggagcagaaggagcgcaagaaggctcagcacaaacactgggaactggcggggaccaaactgggagatataatgggcgtcaagaaggaggaagagccagataaagctgtgacggaggatgggaaggtggactacaggacagagcagaagtttgcagatcacatgaagagaaagagcgaagccagcagtgaatttgcaaagaagaagtccatcctggagcagaggcagtacctgcccatctttgcagtgcagcaggagctgctcactattatcagagacaacagcatcgtgatcgtggttggggagacggggagtggtaagaccactcagctgacgcagtacctgcatgaagatggttacacggactatgggatgattgggtgtacccagccccggcgtgtagctgccatgtcagtggccaagagagtcagtgaagagatggggggaaaccttggcgaggaggtgggctatgccatccgctttgaagactgcacttcagagaacaccttgatcaaatacatgactgacgggatcctgctccgagagtccctccgggaagccgacctggatcactacagtgccatcatcatggacgaggcccacgagcgctccctcaacactgacgtgctctttgggctgctccgggaggtagtggctcggcgctcagacctgaagctcatcgtcacatcagccacgatggatgcggagaagtttgctgccttttttgggaatgtccccatcttccacatccctggccgtaccttccctgttgacatcctcttcagcaagaccccacaggaggattacgtggaggctgcagtgaagcagtccttgcaggtgcacctgtcgggggcccctggagacatccttatcttcatgcctggccaagaggacattgaggtgacctcagaccagattgtggagcatctggaggaactggagaacgcgcctgccctggctgtgctgcccatctactctcagctgccttctgacctccaggccaaaatcttccagaaggctccagatggcgttcggaagtgcatcgttgccaccaatattgccgagacgtctctcactgttgacggcatcatgtttgttatcgattctggttattgcaaattaaaggtcttcaaccccaggattggcatggatgctctgcagatctatcccattagccaggccaatgccaaccagcggtcagggcgagccggcaggacgggcccaggtcagtgtttcaggctctacacccagagcgcctacaagaatgagctcctgaccaccacagtgcccgagatccagaggactaacctggccaacgtggtgctgctgctcaagtccctcggggtgcaggacctgctgcagttccacttcatggacccgcccccggaggacaacatgctcaactctatgtatcagctctggatcctcggggccctggacaacacaggtggtctgacctctaccgggcggctgatggtggagttcccgctggaccctgccctgtccaagatgctcatcgtgtcctgtgacatgggctgcagctccgagatcctgctcatcgtttccatgctctcggtcccagccatcttctacaggcccaagggtcgagaggaggagagtgatcaaatccgggagaagttcgctgttcctgagagcgatcatttgacctacctgaatgtttacctgcagtggaagaacaataattactccaccatctggtgtaacgatcatttcatccatgctaaggccatgcggaaggtccgggaggtgcgagctcaactcaaggacatcatggtgcagcagcggatgagcctggcctcgtgtggcactgactgggacatcgtcaggaagtgcatctgtgctgcctatttccaccaagcagccaagctcaagggaatcggggagtacgtgaacatccgcacagggatgccctgccacttgcaccccaccagctccctttttggaatgggctacaccccagattacatagtgtatcacgagttggtcatgaccaccaaggagtatatgcagtgtgtgaccgctgtggacggggagtggctggcggagctgggccccatgttctatagcgtgaaacaggcgggcaagtcacggcaggagaaccgtcgtcgggccaaagaggaagcctctgccatggaggaggagatggcgctggccgaggagcagctgcgagcccggcggcaggagcaggagaagcgcagccccctgggcagtgtcaggtctacgaagatctacactccaggccggaaagagcaaggggagcccatgacccctcgccgcacgccagcccgctttggtctgtga

SEQ ID NO: 612 - DNA, 3666 bp, Homo sapiens
  source 1..3666: mol_type = genomic DNA
atggagtgcgccctcctgctcgcgtgtgccttcccggctgcgggttcgggcccgccgaggggcctggcgggactggggcgcgtggccaaggcgctccagctgtgctgcctctgctgtgcgtcggtcgccgcggccttagccagtgacagcagcagcggcgccagcggattaaatgatgattacgtctttgtcacgccagtagaagtagactcagccgggtcatatatttcacacgacattttgcacaacggcaggaaaaagcgatcggcgcagaatgccagaagctccctgcactaccgattttcagcatttggacaggaactgcacttagaacttaagccctcggcgattttgagcagtcactttattgtccaggtacttggaaaagatggtgcttcagagactcagaaacccgaggtgcagcaatgcttctatcagggatttatcagaaatgacagctcctcctctgtcgctgtgtctacgtgtgctggcttgtcaggtttaataaggacacgaaaaaatgaattcctcatctcgccattacctcagcttctggcccaggaacacaactacagctcccctgcgggtcaccatcctcacgtactgtacaaaaggacagcagaggagaagatccagcggtaccgtggctaccccggctctggccggaattatcctggttactccccaagtcacattccccatgcatctcagagtcgagagacagagtatcaccatcgaaggttgcaaaagcagcatttttgtggacgacgcaagaaatatgctcccaagcctcccacagaggacacctatctaaggtttgatgaatatgggagctctgggcgacccagaagatcagctggaaaatcacaaaagggcctcaatgtggaaaccctcgtggtggcagacaagaaaatggtggaaaagcatggcaagggaaatgtcaccacatacattctcacagtaatgaacatggtttctggcctatttaaagatgggactattggaagtgacataaacgtggttgtggtgagcctaattcttctggaacaagaacctggaggattattgatcaaccatcatgcagaccagtctctgaatagtttttgtcaatggcagtctgccctcattggaaagaatggcaagagacatgatcatgccatcttactaacaggatttgatatttgttcttggaagaatgaaccatgtgacactctagggtttgcccccatcagtggaatgtgctctaagtaccgaagttgtaccatcaatgaggacacaggacttggccttgccttcaccatcgctcatgagtcagggcacaactttggtatgattcacgatggagaagggaatccctgcagaaaggctgaaggcaatatcatgtctcccacactgaccggaaacaatggagtgttttcatggtcttcctgcagccgccagtatctcaagaaattcctcagcacacctcaggcggggtgtctagtggatgagcccaagcaagcaggacagtataaatatccggacaaactaccaggacagatttatgatgctgacacacagtgtaaatggcaatttggagcaaaagccaagttatgcagccttggttttgtgaaggatatttgcaaatcactttggtgccaccgagtaggccacaggtgtgagaccaagtttatgcccgcagcagaagggaccgtttgtggcttgagtatgtggtgtcggcaaggccagtgcgtaaagtttggggagctcgggccccggcccatccacggccagtggtccgcctggtcgaagtggtcagaatgttcccggacatgtggtggaggagtcaagttccaggagagacactgcaataaccccaagcctcagtatggtggcttattctgtccaggttctagccgtatttatcagctgtgcaatattaacccttgcaatgaaaatagcttggattttcgggctcaacagtgtgcagaatataacagcaaacctttccgtggatggttctaccagtggaaaccctatacaaaagtggaagaggaagatcgatgcaaactgtactgcaaggctgagaactttgaatttttttttgcaatgtccggcaaagtgaaagatggaactccctgctccccaaacaaaaatgatgtttgtattgacggggtttgtgaactagtgggatgtgatcatgaactaggctctaaagcagtttcagatgcttgtggcgtttgcaaaggtgataattcaacttgcaagttttataaaggcctgtacctcaaccagcataaagcaaatgaatattatccggtggtcctcattccagctggcgcccgaagcatcgaaatccaggagctgcaggtttcctccagttacctcgcagttcgaagcctcagtcaaaagtattacctcaccgggggctggagcatcgactggcctggggagttccccttcgctgggaccacgtttgaataccagcgctctttcaaccgcccggaacgtctgtacgcgccagggcccacaaatgagacgctggtctttgaaattctgatgcaaggcaaaaatccagggatagcttggaagtatgcacttcccaaggtcatgaatggaactccaccagccacaaaaagacctgcctatacctggagtatcgtgcagtcagagtgctccgtctcctgtggtggaggttacataaatgtaaaggccatttgcttgcgagatcaaaatactcaagtcaattcctcattctgcagtgcaaaaaccaagccagtaactgagcccaaaatctgcaacgctttctcctgcccggcttactggatgccaggtgaatggagtacatgcagcaaggcctgtgctggaggccagcagagccgaaagatccagtgtgtgcaaaagaagcccttccaaaaggaggaagcagtgttgcattctctctgtccagtgagcacacccactcaggtccaagcctgcaacagccatgcctgccctccacaatggagccttggaccctggtctcagtgttccaagacctgtggacgaggggtgaggaagcgtgaactcctctgcaagggctctgccgcagaaaccctccccgagagccagtgtaccagtctccccagacctgagctgcaggagggctgtgtgcttggacgatgccccaagaacagccggctacagtgggtcgcttcttcgtggagcgagtgttctgcaacctgtggtttgggtgtgaggaagagggagatgaagtgcagcgagaagggcttccagggaaagctgataactttcccagagcgaagatgccgtaatattaagaaaccaaatctggacttggaagagacctgcaaccgacgggcttgcccagcccatccagtgtacaacatggtagctggatggtattcattgccgtggcagcagtgcacagtcacctgtgggggaggggtccagacccggtcagtccactgtgttcagcaaggccggccttcctcaagttgtctgctccatcagaaacctccggtgctacgagcctgtaatacaaacttctgtccagctcctgaaaagagagaggatccatcctgcgtagatttcttcaactggtgtcacctagttcctcagcatggtgtctgcaaccacaagttttacggaaaacaatgctgcaagtcatgcacaaggaagatctga

SEQ ID NO: 613 - DNA, 1308 bp, Homo sapiens
  source 1..1308: mol_type = genomic DNA
atggagggacagaccccaggaagcaggggccttccagaaaagcctcaccctgccacggctgctgccactctgtcctcgatgggcgctgtcttcatcctcatgaagtccgcgctgggagctggcctgctcaacttcccctgggccttctccaaagcgggcggagtggtccctgccttcctggtggagctggtctcgttggtcttcctgatcagcgggctggtcatcctgggctatgctgctgctgtcagtggccaggccacctaccagggtgtggtcagggggctgtgtggccctgccattgggaagctgtgtgaggcctgcttcctcctcaacctgctcatgatctccgtggccttcctcagggtgatcggggaccagctggagaagctgtgtgactccctcctgtctggcaccccgcccgccccgcagccgtggtacgcagaccagcgcttcaccctgcccctgctctccgtgctggtcatcctgcccctgtctgccccgcgggagatcgccttccagaaatacacaagcatcctaggcactctggctgcctgttacctggccctggtcatcaccgtgcagtactacctctggccccagggcctcgtgcgtgagtcccatccttcactgagccctgcctcctggacctctgtgttcagtgtcttccccaccatctgcttcgggtttcagtgtcacgaagctgccgtctccatctactgcagcatgcgcaaacggagcctctcccactgggccctggtgtctgtgctgtccttgctggcctgctgcctcatctattcactgacgggggtttatggcttcctgacttttgggacagaagtttctgctgacgtcttgatgtcctacccaggcaatgatatggtcatcattgtggcccgggtcctttttgctgtctccatcgtaactgtctaccccatcgtgctcttcctggggaggtcagtgatgcaggacttctggaggaggagctgcttggggggatgggggcccagcgccctggccgacccctcagggctgtgggtccggatgccgctgaccatcctgtgggtcaccgtgacgctcgccatggcgctgtttatgcctgacctcagcgagatcgtcagcatcatcggaggcatcagttccttcttcatcttcatcttcccaggtttgtgcctcatctgtgcaatgggtgtcgagcctataggaccaagagtcaagtgctgcctggaggtctggggagtggtctctgtgctggtcggcaccttcatctttgggcagagcacggcggcagcggtctgggagatgttctga

SEQ ID NO: 614 - DNA, 3312 bp, Homo sapiens
  source 1..3312: mol_type = genomic DNA
atgaccgcctgcgcccgccgagcgggtgggcttccggaccccgggctctgcggtcccgcgtggtgggctccgtccctgccccgcctcccccgggccctgccccggctcccgctcctgctgctcctgcttctgctgcagccccccgccctctccgccgtgttcacggtgggggtcctgggcccctgggcttgcgaccccatcttctctcgggctcgcccggacctggccgcccgcctggccgccgcccgcctgaaccgcgaccccggcctggcaggcggtccccgcttcgaggtagcgctgctgcccgagccttgccggacgccgggctcgctgggggccgtgtcctccgcgctggcccgcgtgtcgggcctcgtgggtccggtgaaccctgcggcctgccggccagccgagctgctcgccgaagaagccgggatcgcgctggtgccctggggctgcccctggacgcaggcggagggcaccacggcccctgccgtgacccccgccgcggatgccctctacgccctgcttcgcgcattcggctgggcgcgcgtggccctggtcaccgccccccaggacctgtgggtggaggcgggacgctcactgtccacggcactcagggcccggggcctgcctgtcgcctccgtgacttccatggagcccttggacctgtctggagcccgggaggccctgaggaaggttcgggacgggcccagggtcacagcagtgatcatggtgatgcactcggtgctgctgggtggcgaggagcagcgctacctcctggaggccgcagaggagctgggcctgaccgatggctccctggtcttcctgcccttcgacacgatccactacgccttgtccccaggcccggaggccttggccgcactcgccaacagctcccagcttcgcagggcccacgatgccgtgctcaccctcacgcgccactgtccctctgaaggcagcgtgctggacagcctgcgcagggctcaagagcgccgcgagctgccctctgacctcaatctgcagcaggtctccccactctttggcaccatctatgacgcggtcttcttgctggcaaggggcgtggcagaagcgcgggctgccgcaggtggcagatgggtgtccggagcagctgtggcccgccacatccgggatgcgcaggtccctggcttctgcggggacctaggaggagacgaggagcccccattcgtgctgctagacacggacgcggcgggagaccggctttttgccacatacatgctggatcctgcccggggctccttcctctccgccggtacccggatgcacttcccgcgtgggggatcagcacccggacctgacccctcgtgctggttcgatccaaacaacatctgcggtggaggactggagccgggcctcgtctttcttggcttcctcctggtggttgggatggggctggctggggccttcctggcccattatgtgaggcaccggctacttcacatgcaaatggtctccggccccaacaagatcatcctgaccgtggacgacatcacctttctccacccacatgggggcacctctcgaaaggtggcccaggggagtcgatcaagtctgggtgcccgcagcatgtcagacattcgcagcggccccagccaacacttggacagccccaacattggtgtctatgagggagacagggtttggctgaagaaattcccaggggatcagcacatagctatccgcccagcaaccaagacggccttctccaagctccaggagctccggcatgagaacgtggccctctacctggggcttttcctggctcggggagcagaaggccctgcggccctctgggagggcaacctggctgtggtctcagagcactgcacgcggggctctcttcaggacctcctcgctcagagagaaataaagctggactggatgttcaagtcctccctcctgctggaccttatcaagggaataaggtatctgcaccatcgaggcgtggctcatgggcggctgaagtcacggaactgcatagtggatggcagattcgtactcaagatcactgaccacggccacgggagactgctggaagcacagaaggtgctaccggagcctcccagagcggaggaccagctgtggacagccccggagctgcttagggacccagccctggagcgccggggaacgctggccggcgacgtctttagcttggccatcatcatgcaagaagtagtgtgccgcagtgccccttatgccatgctggagctcactcccgaggaagtggtgcagagggtgcggagcccccctccactgtgtcggcccttggtgtccatggaccaggcacctgtcgagtgtatcctcctgatgaagcagtgctgggcagagcagccggaacttcggccctccatggaccacaccttcgacctgttcaagaacatcaacaagggccggaagacgaacatcattgactcgatgcttcggatgctggagcagtactctagtaacctggaggatctgatccgggagcgcacggaggagctggagctggaaaagcagaagacagaccggctgcttacacagatgctgcctccgtctgtggctgaggccttgaagacggggacaccagtggagcccgagtactttgagcaagtgacactgtactttagtgacattgtgggcttcaccaccatctctgccatgagtgagcccattgaggttgtggacctgctcaacgatctctacacactctttgatgccatcattggttcccacgatgtctacaaggtggagacaataggggacgcctatatggtggcctcggggctgccccagcggaatgggcagcgacacgcggcagagatcgccaacatgtcactggacatcctcagtgccgtgggcactttccgcatgcgccatatgcctgaggttcccgtgcgcatccgcataggcctgcactcgggtccatgcgtggcaggcgtggtgggcctcaccatgccgcggtactgcctgtttggggacacggtcaacaccgcctcgcgcatggagtccaccgggctgccttaccgcatccacgtgaacttgagcactgtggggattctccgtgctctggactcgggctaccaggtggagctgcgaggccgcacggagctgaagggcaagggcgccgaggacactttctggctagtgggcagacgcggcttcaacaagcccatccccaaaccgcctgacctgcaaccggggtccagcaaccacggcatcagcctgcaggagatcccacccgagcggcgacggaagctggagaaggcgcggccgggccagttctcttga

SEQ ID NO: 615 - DNA, 7008 bp, Homo sapiens
  source 1..7008: mol_type = genomic DNA
atggccggagtgtttccttatcgagggccgggtaacccggtgcctggccctctagccccgctaccggactacatgtcggaggagaagctgcaggagaaagctcgaaaatggcagcaattgcaggccaagcgctatgcagaaaagcggaagtttgggtttgtggatgcccagaaggaagacatgcccccagaacatgtcaggaagatcattcgagaccatggagacatgaccaacaggaagttccgccatgacaaaagggtttacttgggtgccctaaagtacatgccccacgcagtcctcaaactcctggagaacatgcctatgccttgggagcagattcgggatgtgcctgtgctgtaccacatcactggagccatttccttcgtcaatgagattccctgggtcattgaacctgtctacatctcccagtgggggtcaatgtggattatgatgcgccgagaaaaaagagataggaggcatttcaagaggatgcgttttcccccttttgatgatgaggagccgcccttggactatgctgacaacatcctagatgttgagccactggaggccattcagctagagctggaccctgaggaggacgcccctgtgttggactggttctatgaccaccagccgttgagggacagcaggaagtatgtaaatggctccacttaccagcgctggcagttcacactacctatgatgtcgactctctaccgcctggctaatcagctcctgacagacttggtggatgacaactacttctacctgtttgatttgaaggccttctttacgtccaaggcactcaatatggccattcctggaggccccaaatttgaacctcttgttcgagacatcaacctacaggatgaagactggaatgaattcaatgatattaacaagattatcatccggcagcctatccgcactgagtacaagattgcttttccttacttgtacaacaatcttccacaccatgtccacctcacctggtaccatactcccaatgttgtattcatcaaaactgaggatcctgacttgccagctttctactttgaccctttgatcaacccaatctcccataggcactcagtcaagagccaggaaccattgccggatgatgatgaggaatttgagctcccggagtttgtggagcccttcctgaaggacacacccctctatacagacaatacagccaatggcattgccctgctctgggccccgcggcccttcaacctacgctctggtcgcacccgtcgggccctggacataccccttgtcaagaactggtatcgggagcattgtcctgccgggcagcctgtgaaagtgagggtctcctaccagaagctgcttaagtactatgtgctgaatgccctgaagcatcggccccctaaggctcaaaagaagaggtatttgttccgctccttcaaagccaccaaattctttcagtccacaaagctggactgggtggaggttgggctccaggtttgccgccagggctacaacatgctcaaccttctcattcaccgcaaaaacctcaactacctgcacctggactacaacttcaacctcaagcctgtgaaaacgctcaccaccaaggaaagaaagaaatctcgttttgggaatgctttccacctgtgtcgggaagttctgcgtttgactaagctggtggtggatagtcacgtgcagtatcggctgggcaatgtggatgccttccagctggcagatggattgcagtatatatttgcccatgttgggcagttgacgggcatgtatcgatacaaatacaagctgatgcgacagattcgcatgtgcaaggacctgaagcatctcatctattatcgtttcaacacgggccctgtagggaagggtcctggctgtggcttctgggctgccggttggcgagtctggctctttttcatgcgtggcattacccctttattagagcgatggcttggcaacctcctggcccggcagtttgaaggtcgacactcaaagggggtggcaaagacagtaacaaagcagcgagtggagtcacattttgaccttgagctgcgggcagctgtgatgcatgatattctggacatgatgcctgaggggatcaagcagaacaaggcccggacaatcctgcagcacctcagtgaagcctggcgctgctggaaagccaacattccctggaaggtccctgggctgccgacgcccatagagaatatgatccttcgatacgtgaaggccaaggctgactggtggaccaacactgcccactacaaccgagaacggatccgccgaggggccactgtggacaagactgtttgtaaaaagaatctgggccgcctcacccggctctatctgaaggcagaacaggagcggcagcacaactacctgaaggacgggccttacatcacagcggaggaagcagtggcagtatataccaccacagtgcattggttggaaagccgcaggttttcacccatcccattccccccactctcctataagcatgacaccaagttgctcatcttggcattggagcggctcaaggaagcttatagtgtgaagtctcggttgaaccagtctcagagggaggagctaggtctgatcgagcaggcctacgataacccccacgaggcgctgtcccgcatcaagcgtcacctcctcacacagagagccttcaaagaggtgggcattgagttcatggatctgtatagccacctcgttccagtatatgatgttgagcccctggagaagataactgatgcttacctggaccagtacctgtggtatgaagccgacaagcgccgcctgttcccaccctggattaagcctgcagacacagaaccacctccgctgcttgtttacaagtggtgtcaaggcatcaataacctgcaggacgtgtgggagacgagtgaaggcgagtgcaatgtcatgctggaatcccgctttgagaagatgtatgagaagatcgacttgactctgctcaacaggctgctgcgcctcatcgtggaccacaacatagccgactacatgacagccaagaacaacgtcgtcatcaactataaggacatgaaccatacgaattcatatgggatcatcagaggcctgcagtttgcctcattcatcgtgcagtattatggcctggtgatggatttgcttgtattgggattgcaccgggccagtgagatggctgggccccctcagatgccaaatgactttctcagtttccaggacatagccactgaggctgcccaccccatccgtctcttctgcagatacattgatcgcatccatatttttttcaggttcacagcagatgaggctcgggacctgattcaacgttacctgacagagcaccctgaccccaataatgaaaacatcgttggctataataacaagaagtgctggccccgagatgcccgcatgcgcctcatgaaacatgatgttaacttaggccgggcggtattctgggacatcaagaaccgcttgccacggtcagtgactacagttcagtgggagaacagcttcgtgtctgtgtacagtaaggacaaccccaacctgctgttcaacatgtgtggcttcgagtgccgcatcctgcctaagtgccgcaccagctatgaggagttcacccacaaggacggggtctggaacctgcagaatgaggttactaaggagcgcacagctcagtgtttcctgcgtgtggacgatgagtcaatgcagcgcttccacaaccgcgtgcgtcagattctcatggcctctgggtccaccaccttcaccaagattgtgaataagtggaatacagctctcattggccttatgacatactttcgggaggctgtggtgaacacccaagagctcttggacttactggtgaagtgtgagaacaaaatccagacacgtatcaagattggactcaactccaagatgccaagtcggttccccccggttgtgttctacacccctaaggagttgggtggactcggcatgctctcaatgggccatgtgctcatcccccaatccgacctcaggtggtccaaacagacagatgtaggtatcacacactttcgttcaggaatgagccatgaagaagaccagctcattcccaacttgtaccgctacatacagccatgggagagcgagttcattgattctcagcgggtctgggctgagtacgcactcaagaggcaagaggccattgctcagaacagacgcctgactttagaagacctagaagattcatgggatcgtggcattcctcgaatcaataccctcttccagaaggaccggcacacactggcttatgataagggctggcgtgtcagaactgactttaagcagtatcaggttttgaagcagaatccgttctggtggacacaccagcggcatgatgggaagctctggaacctgaacaactaccgtacagacatgatccaggccctgggcggtgtggaaggcattctggaacacacactctttaagggcacttacttccctacctgggaggggcttttctgggagaaggccagtggctttgaggaatctatgaagtggaagaagctaactaatgctcagcgatcaggactgaaccagattcccaatcgtagattcaccctctggtggtccccgaccattaatcgagccaatgtatatgtaggctttcaggtgcagctagacctgacgggtatcttcatgcacggcaagatccccacgctgaagatctctctcatccagatcttccgagctcacttgtggcagaagatccatgagagcattgttatggacttatgtcaggtgtttgaccaggaacttgatgcactggaaattgagacagtacaaaaggagacaatccatccccgaaagtcatataagatgaactcttcctgtgcagatatcctgctctttgcctcctataagtggaatgtctcccggccctcattgctggctgactccaaggatgtgatggacagcaccaccacccagaaatactggattgacatccagttgcgctggggggactatgattcccacgacattgagcgctacgcccgggccaagttcctggactacaccaccgacaacatgagtatctacccttcgcccacaggtgtactcatcgccattgacctggcctataacttgcacagtgcctatggaaactggttcccaggcagcaagcctctcatacaacaggccatggccaagatcatgaaggcaaaccctgccctgtatgtgttacgtgaacggatccgcaaggggctacagctctattcatctgaacccactgagccttatttgtcttctcagaactatggtgagctcttctccaaccagattatctggtttgtggatgacaccaacgtctacagagtgactattcacaagacctttgaagggaacttgacaaccaagcccatcaacggagccatcttcatcttcaacccacgcacagggcagctgttcctcaagataatccacacgtccgtgtgggcgggacagaagcgtttggggcagttggctaagtggaagacagctgaggaggtggccgccctgatccgatctctgcctgtggaggagcagcccaagcagatcattgtcaccaggaagggcatgctggacccactggaggtgcacttactggacttccccaatattgtcatcaaaggatcggagctccaactccctttccaggcgtgtctcaaggtggaaaaattcggggatctcatccttaaagccactgagccccagatggttctcttcaacctctatgacgactggctcaagactatttcatcttacacggccttctcccgtctcatcctgattctgcgtgccctacatgtgaacaacgatcgggcaaaagtgatcctgaagccagacaagactactattacagaaccacaccacatctggcccactctgactgacgaagaatggatcaaggtcgaggtgcagctcaaggatctgatcttggctgactacggcaagaaaaacaatgtgaacgtggcatcactgacacaatcagaaattcgagacatcatcctgggtatggagatctcggcaccgtcacagcagcggcagcagatcgctgagatcgagaagcagaccaaggaacaatcgcagctgacggcaacacagactcgcactgtcaacaagcatggcgatgagatcatcacctccaccaccagcaactatgagacccagactttctcatccaagactgagtggagggtcagggccatctctgctgccaacctgcacctaaggaccaatcacatctatgtttcatctgacgacatcaaggagactggctacacctacatccttcccaagaatgtgcttaagaagttcatctgcatatctgaccttcgggcccaaattgcaggatacctatatggggtgagcccaccagataacccccaggtgaaggagatccgctgcattgtgatggtgccgcagtggggcactcaccagaccgtgcacctgcctggccagctgccccagcatgagtacctcaaggagatggaacccttaggttggatccacactcagcccaatgagtccccgcagttatcaccccaggatgtcaccacccatgccaagatcatggctgacaacccatcttgggatggcgagaagaccattatcatcacatgcagcttcacgccaggctcctgtacactgacggcctacaagctgacccccagtggctacgaatggggccgccagaacacagacaagggcaacaaccccaagggctacctgccttcacactatgagagggtgcagatgctgctgtcggaccgtttccttggcttcttcatggtccctgcccagtcctcgtggaactacaacttcatgggtgttcggcatgaccccaacatgaaatatgagctacagctggcgaaccccaaagagttctaccacgaggtgcacaggccctctcacttcctcaactttgctctcctgcaggagggggaggtttactctgcggatcgggaggacctgtatgcctga

SEQ ID NO: 616 - DNA, 1155 bp, Homo sapiens
  source 1..1155: mol_type = genomic DNA
atggatgccgctctgctcctgaacgtggaaggggtcaagaaaaccattctgcacgggggcacgggcgagctcccaaacttcatcaccggatcccgagtgatctttcatttccgcaccatgaaatgtgatgaggagcggacagtcattgacgacagtcggcaggtgggccagcccatgcacatcatcatcggaaacatgttcaagctcgaggtctgggagatcctgcttacctccatgcgggtgcacgaggtggccgagttctggtgcgacaccatccacacgggggtctaccccatcctatcccggagcctgaggcagatggcccagggcaaggaccccacagagtggcacgtgcacacgtgcgggctggccaacatgttcgcctaccacacgctgggctacgaggacctggacgagctgcagaaggagcctcagcctctggtctttgtgatcgagctgctgcaggttgatgccccgagtgattaccagagggagacctggaacctgagcaatcatgagaagatgaaggcggtgcccgtcctccacggagagggaaatcggctcttcaagctgggccgctacgaggaggcctcttccaagtaccaggaggccatcatctgcctaaggaacctgcagaccaaggagaagccatgggaggtgcagtggctgaagctggagaagatgatcaatactctgatcctcaactactgccagtgcctgctgaagaaggaggagtactatgaggtgctggagcacaccagtgatattctccggcaccacccaggcatcgtgaaggcctactacgtgcgtgcccgggctcacgcagaggtgtggaatgaggccgaggccaaggcggacctccagaaagtgctggagctggagccgtccatgcagaaggcggtgcgcagggagctgaggctgctggagaaccgcatggcggagaagcaggaggaggagcggctgcgctgccggaacatgctgagccagggtgccacgcagcctcccgcagagccacccacagagccacccgcacagtcatccacagagccacctgcagagccacccacagcaccatctgcagagctgtccgcagggccccctgcagagccagccacagagccacccccgtccccagggcactcgctgcagcactga

SEQ ID NO: 617 - DNA, 2925 bp, Homo sapiens
  source 1..2925: mol_type = genomic DNA
atggccaaggcgggccgtgcaggtggtcctcccccgggcggcggtgccccctggcaccttcgaaatgtcctcagtgactctgtggagagctcagatgatgaattctttgatgccagagaggagatggctgaagggaagaatgccatcctcattgggatgagccagtggaactccaatgacctcgtggagcagatcgagaccatggggaaactggacgagcatcaaggagaagggaccgcgccgtgcacatccagcatcctccaggagaagcagcgagaactgtaccgggtttccttgagaagacagaggttcccagcccagggaagcatcgagatccacgaagacagcgaggaaggctgcccgcagcgctcctgcaagacacatgtcctcctgctggtcctgcatgggggaaacatcctggacacgggtgccggggacccgtcctgcaaggcagccgacatccacaccttcagctccgtgctggagaaggtcacacgagcccatttccctgctgccctgggccacatcctcatcaagttcgtcccctgtcctgccatctgctctgaggctttctcgcttgtctctcacctgaacccctacagccacgatgagggctgcctcagcagcagccaggaccacgtccctctggccgcccttcccctgttggccatctcctccccgcagtaccaggatgctgtcgccaccgtcatcgagcgagccaaccaggtctacagagagttcctgaagtcctctgatgggattggcttcagtgggcaggtgtgtctcatcggggactgtgtggggggcctcctggccttcgatgccatctgctacagtgcggggccctcaggggacagccctgccagcagcagccggaaggggagcatcagcagcacccaggacaccccagtcgcggtggaggaagattgcagcctggccagcagcaagcgtctcagcaaaagcaacattgacatctccagtgggttggaggatgaggagcccaagaggccgttgccgcggaaacagagcgactcctccacctatgactgcgaggccatcacccagcaccatgccttcctctcaagcatccactccagcgtgctaaaggatgagtctgagaccccggcggctggggggccgcagctccctgaggtcagcctgggccgctttgacttcgatgtgtccgacttcttcctcttcggctcgccactgggcctggtcctggccatgcggaggacggtgctgcctgggctggacggcttccaggtgcgtcctgcctgcagccaggtctacagcttcttccattgcgcagacccctctgcctcacggctcgagccactgctggagcccaagttccacctggtgccgcctgtcagcgtgcctcgctaccagaggttcccactgggcgatgggcagtccctcctcctcgctgatgccctacacacccacagccccctcttcctggagggcagctcccgggacagcccgccacttctggatgcccctgcctcgccccctcaggcctcgaggttccagcgcccaggacggaggatgagcgaggggagctcccacagcgagagctcggagtcctcggacagcatggcacccgtgggtgcctcccgcatcacagccaagtggtggggaagcaagaggatcgactatgccctgtactgccctgatgtcctcacggccttccccaccgtggccctgccccacctcttccacgccagttactgggagtccacagacgtggtggccttcatcctgagacaggtaatgcgctatgagagcgtgaacatcaaggaaagcgcccgcctggaccctgcagcactgagtcctgccaacccccgggagaagtggcttcgtaagcggactcaggtcaagctgaggaatgtcacggctaatcaccgggccaatgatgtgattgctgctgaagatggcccccaggtcctggtggggcggttcatgtacgggcccctcgacatggtggctctgactggagagaaggtggacatcctagtaatggcagagccatcctcaggccgctgggtacacctggacacagagatcaccaacagcagtggtcgcatcacatacaatgtgccgcggccccggcgcctgggggttggtgtctatcctgtgaagatggtcgtcaggggcgaccagacctgtgccatgagctacctcacggtgttgcccaggggcatggagtgtgtagtgttcagcattgatgggtccttcgcggccagcgtgtctatcatgggaagcgaccccaaggtccggccgggtgcagtggatgttgtccggcactggcaggacttgggctacatgatcctttacatcacgggacggccggacatgcagaagcagcgggtggtgtcgtggctgtcccagcacaacttcccacagggcatgatcttcttctccgatgggctggtgcatgacccgctgcggcagaaggccatcttcctgcgcaacctcatgcaggagtgcttcatcaaaatcagtgcggcctatggctccacgaaggacatctctgtctacagcgtgctgggcctgcctgcctcccagatcttcattgtgggccggcccaccaagaagtaccaaacccagtgccagttcctgagcgagggctacgccgcacacctggccgcgctggaggccagccaccgctcacgcccaaagaagaacaactcgcgcatgatcctgcgcaagggcagcttcgggctgcacgcgcagccagagttcctgcggaagcgcaaccacctgcgcagaaccatgtcagtgcagcagcccgacccgcccgccgccaaccccaagcccgagcgggcccagagccagcccgagtcggacaaagaccacgagcggccgctgccggcgctcagctgggcgcgtgggccccccaagttcgagtcggtgccctga

SEQ ID NO: 618 - DNA, 723 bp, Homo sapiens
  source 1..723: mol_type = genomic DNA
atgaaggtgaagaagggcggcggtggggccgggacggcgacggagtccgctccggggccctcgggccagagcgtggcccccataccacagccgcctgcggaatccgaatctgggtccgagtcggagccggacgcaggcccagggcccaggccggggccgctgcagaggaagcagccgatcgggccggaggacgtgctggggctgcagcggatcaccggtgactacctctgctcccctgaggagaatatctacaagatcgactttgtcaggtttaagattcgggacatggactcaggcactgtcctctttgaaatcaagaagcccccagtctcagaacggttgcccatcaaccggcgggacctggaccccaatgctgggcgctttgtccgctaccagttcacgcctgccttcctccgcctgaggcaggtgggagccacggtggagttcacagtgggagacaagcctgtcaacaacttccgcatgatcgagaggcactacttccgcaaccagctactcaaaagcttcgacttccactttggcttctgcatccccagcagcaagaacacctgcgagcacatttacgacttcccccctctctccgaggagctgatcagcgagatgatccgccacccgtatgagacccagtctgacagcttctacttcgtggatgaccggctggtgatgcacaataaagcagactattcctacagcgggacaccctga

SEQ ID NO: 619 - DNA, 7104 bp, Homo sapiens
  source 1..7104: mol_type = genomic DNA
atgggcaccaggggagcggtcatgccccctcctatgtgggggctgctgggctgctgttttgtctgtgcctgggctctggggggtccacggcccatccgctctctgccccctctgtcttcccaagtcaagccaggatctgtacccatgcaggtgcccctagagggggccgaggccgccctcgcttatctctactctggagatgcccagcagctatcacaggtgaattgcagtgagcgctatgaagcgcgtggggcaggagccatgccagggctccccccaagcctacagggggcagcgggcacccttgcccaggccgccaattttctcaacatgctgctgcaagccaacgacatccgtgagtccagtgtggaggaggatgtggaatggtaccaggcactggtccgcagcgtggccgagggggacccaagagtgtacagggctttgctgacctttaaccctccaccaggggccagccacctacagctggccctgcaggccacccggactggggaggaaaccatcctgcaggacttgtctgggaactgggtgcaggaggagaaccctcctggggacctggacacccctgccctgaagaagcgagtgttgaccaatgacctagggagcctcggcagccccaagtggccgcaggcagatggatatgtgggggacacgcagcaggtgaggctgtctcctcctttcctggaatgccaggagggacggctccgacctggatggctgatcacactctctgccaccttctatggactcaagccagacctcagcccagaagtcagggggcaggtgcagatggacgtagatctccagagtgtggacatcaatcagtgtgcaagtggcccaggctggtactctaacacacacctgtgtgatctcaacagcacccagtgtgtccccctggagagtcagggctttgttcttggccgctacctctgccgctgccgacctggattctacggggcaagcccctctggggggttagaggagagtgacttccagactaccgggcaattcgggttcccagaaggcagatctgggagactgctgcagtgtctgccatgtcctgagggctgcaccagctgcatggatgccacaccgtgcctggtggaagaggccgcggtgctgcgggccgctgtgctggcctgccaggcctgctgcatgctggccatcttcctgagcatgctggtctcctaccgctgccgccggaacaagaggatctgggcatctggagtggtcctgctggaaactgtcctttttggattcctgctgctttactttcctgtcttcatcctatacttcaagcccagtgtattccgctgcatcgctcttcgctgggtgcggctgctgggttttgccatcgtctacggcaccatcatactcaagctttacagagtgctgcagctgtttctgtctcgaacggcccagcggagtgcccttctgagcagcgggcggctgctgcggcacctggggctgctcctgctacctgtgctgggcttcctggctgtgtggaccgtgggcgccctggagcgaggcatccagcacgcacctctggtgatccgaggccacactcccagtggccgccatttctacctctgtcaccacgaccgctgggactacatcatggttgtggctgagctgctgctgctgtgctggggcagcttcctctgctacgccacacgggctgtgctctcggccttccatgagccacgctacatgggcatcgccctgcacaatgagctactgctttccgctgccttccacacagccaggtttgtgctggttccctctctgcacccggactggaccctcctcctcttcttcttccacacccacagcacagtcaccaccacgctggctctgatcttcatccctaagttctggaagctgggggctcctccccgggaggagatggtggatgaggtgtgtgaggacgagctggacctgcagcactcaggctcctaccttggcagcagcatcgcctcagcctggagtgagcacagcctggaccctggagacattcgggacgagctgaagaagctctatgcccagctagaggtccacaaaaccaaggaaatggccgcaaacaacccccacctgcccaagaagcgaggcagctcatgccagggactgggccgctccttcatgaggtacctggcggaattccccgaggccctggccaggcagcactcccgggactcaggatccccaggccacggcagcctgcccggctcctcccgccgccggctcctcagctccagcctccaggaacccgaggggacaccagctctgcacaagtcccgcagcacctatgaccagcgcagggagcaggacccgcctcttcttgactcactgctgaggaggaagctggccaagaaggcctctcgaacagagagccgggagtcggtggaggggccccctgccctgggcttcaggtcagccagcgcccacaacctgacggtgggagagaggctacccagagcccggcccgcctctctgcagaagtcgctcagtgtggccagctccagggaaaaggccttgctcatggccagccaggcctacctggaggagacctaccggcaagcaaaggagcgggaggagcggaagaaggccaaggcagccatggccagcctggtgcggaggccatcagccaggaggctggagcggcctcgaggggcccccctgtcagctccaccttcccctgccaagagcagcagcgtggacagctctcacacctctgggaggcttcatgaggaggctaggagaaggctgcctcatccacccatcaggcaccaggtttctacccccatcttggccctgtctgggggcctgggagagccaaggatgctatctcccacctccaccttggctccagctctgctgccagctctagctccaaccccagcccctgccctggcaccagtcccagtatccccacaaagccccaacttactcacctacatctgcccctgggagaacgcagaactgccagccaagcaagaaaatgtgccccaggaaggcccctcagggccagagcgaggccaccactcccctgccccagctcgagccaggctctggagggccctctctgttgcagtagagaaaagcagggctggggagaatgagatggacgcagaggatgcacatcaccagagggaagctaatgatgtggacgaagacaggcccaagatcttccctaaatcccacagcctcaaggcccctgttcagcagggttccatgcgcagcctggggctggcgattaaagctctgacccgttctcggagcacctacagagagaaggagagtgtggaggagagtcccgaggggcagaacagcgggactgcgggagagagtatgggggcaccctcccgatcgcccaggctaggccggcccaaggcggtgagtaagcaggccgctcttatcccctccgatgacaaggagtccctccagaaccaacagaacgctcacaccagcaggatgctccaagtctgtcaacgggagggcagcagggaacaagaagacagaggcaggaggatgacccagggtctaggggaacggaaagctgagagagcaggtaaaacagggcttgccatgctgaggcaagtttccagggacaaaaacatcaagcaatcaaaagaaacccctgtcgggtggcaggaactgcccaaagctggcctccagtccctgggcagcgctgaccacagggtggcagaggtatgcccctgggaggtcactgaatcagaaacgcgtcagccagacagtggcaacaaggccgaaatctgcccctgggagacgagtgaaggagccccagagtcgagggcactaagacaagacccaggtgactcccaaaaaaagagaggggaggcccggggaaaatcagagcccatagatgtggttcccatgatgcggaaaaagccagagaggctggtgagggagcaggaagcagtgtgtccctgggagagtgccgatcgaggaggtctgtcccctgggtcagctcctcaggaccctggcagaatcagagacaaatctgaggcgggggacagtgtggaggccaggaaggtggagaagcctgggtgggaagctgctggcccagaagctcatacccctgacatcaccaaggcagagccgtgtccctgggaggcaagtgaaggaggcgaggatgggaaaccagcccaagaggcagtgaaggatctccctcaggaaaagcagaaaaccaggaaagcaaccttttggaaagaacagaaaccgggaggagacttggagtctctttgtccatgggagagtacagatttccggggcccctcagcagtctcaattcaggccccaggaagctcagagtgttcagggagtttgggcagtggcattgctgaagtgtgtctgtgggaggcaggagatgctcctgctatccagaaagcagagatctgtccctgggagctggatgataacgtgatggggcaggaaatgctgagtctggggacaggtagagaatctcttcaagaaaaggaaaaagcctccagaaaaggaagctttggagagatgggggaacaaactgtgaaagcagtgcagaaattaagtcaacagcaggagtcagtttgtcccagggagagcacggtccctgggcactccagcccatgtctagacaattcctcatccaaagctggtagccaattcctatgcaatggaggaagcagagcaacgcaggtgtgtccacaggaagatctcaggccggaggcacaggaagcaacacctgccaaaacagaaatctgtccctgggaggtaaatgaaagaacaagagaggaatggacatcagcacaggtgccaagaggaggagaatctcaaaaggacaaggagaaaatgcctggaaaatcggaaatcgaagatgtcacagcttgggaaaagcctgaggggcagatccaaaagcaagaagcggtcggcccctgggagagtgtggaccctggcagcttctccccacaaccacgtcctcaagacacagagagaccccaaacccttctccagatgtcaggcagtgtgggaagcaaagctgccgacatttgccctttggatgtggaggaaaacttgactgctgggaaggcagaaatctgtccctgggaggtgggtgctggagcaggggaggaaagggctttgggagctgaggccattaggaaatctccaaatgatacaggcaaggtttctgcagatcttggacccagggagagagctgttactgctccagagaagccacagaagccaaccccagagtgggaggtggcttgtccctgggggagtgtgggtccaggggcctgttctcagcatccaggtactctagatgctgatggaccaaaagctgggttccaggaactggatcatatgggctgcaggccaggtgaagtgtgtccctgggaagcacaggaagctgctaccagtgaaaaagccaagatctgtccctgggaggtaagtgaaggaactactgggaagggattggaccaaaaggcagggagtgaatcagcagagcagagggagaaagctctagaaaaggggagactcacttccctgggagaagacgtatcaaaagggatggcaaaactgtgtcaacaacaggaaactatttgtatttgggagaacaaggacttgagggaatcccctgctcaggcccccaagatctcagacttgcccagcagcatgagtagtgaagtggcagagggacattccttggaagcaacagagaagggggacctgagacaagacccaaagacaggttccttcccagaacacataacccaagaaaaagctccagctgcagacacagaagaattcactactgaagatggggaaaaaacaagccatgagctacaatccgtctgtccatgggagaccactgccccagcagattccgtctctcacctagacagacagcgccctgaccaacctaaagctagctcccagagactggtcagcactgggggcagggccgctgacgtgtgcccatgggatgttcctgatgcaggtgtgtataaatctgacagcagtgccaaggctgagacctgtccctgggaagtgactgaaagaatccctgtcaaaggggtgtcaaggcaggatggaaaaggggactctcaagaagagaaaggcagagccccagaaaaatcagagccaaaaggtgtgccagttcagaaaaagccagagatggcagacttcaggcagcaggaggctgtgtgtccctgggagagtcaagatggcaagggtctgtccccacagccagccccagatgcttctgacagaagcagaggcagttctgaggcagcaggcagtgtggagaccagggtagcggaagtgtgtctgtgggaagtggtagaggctccctctgccaagaaagcagagatctgcccttgggaggcgggtggaggagcagcagaggaaggggaacaggaaagagaatcacaagggcaaggagagatgttccttcagaaggcaggacctggagggacggaagaacacttctcaaaagcagcagcaaagcccagagagcaggaggcagtctgccctggggaaggcacaggctcaggagggctcttgccccagtcaggtgccctggacccagaactcaaagtcagccccaaggaagcaggcagcatgggaagcaggatggcagagctgtgccaatgggaaatcacagatccagaaggaaataaaataaagggtaccatggcagacatctgtcctggggaggaaactggagtcccatctgaggaatctggcctcctggctttaacagcaactcggagagaatttttccccacagctcctgaaaaaccactatgccttttagtccatgggcctctggatcacttctttccagaaagcaaaatcccctgccccaaggtaagcaggccagccagtactttcactctagaaggtgtcagagaactacaaggaccttcagggcttgagccaaggaccagcttagccccagagccaagtctccaggaagctgagtctcagtcttcgtccttaactgaagactcaggccaagtggcttttgaagctcagtatgaagaattcacccctcccactgtctatccttgggattgggagtaa

SEQ ID NO: 620 - DNA, 1680 bp, Homo sapiens
  source 1..1680: mol_type = genomic DNA
atggcggagaccgtctggagcactgacaccggggaggcagtgtatcgctcccgggaccccgtgcgcaacttgcgcctccgagtccacctgcaaagaatcacatcaagcaactttcttcattatcagcctgctgccgagctcgggaaggacctcatagacttggccacttttaggcctcagccaactgccagtggacaccgcccagaggaagacgaagaggaggagattgtgattgggtggcaggagaagctctttagccagtttgaagtagatctgtaccaaaatgaaacagcctgtcagagtcctttggattatcagtaccgtcaggagatcctgaagctggagaattcgggtggcaagaaaaaccgacgaatctttacctacactgactctgatagatacaccaatttggaggagcactgtcagagaatgaccactgcagccagcgaggtgccttcattcttggtcgagcgaatggcaaatgtcaggcgtcgccggcaggacaggcgagggatggagggcggcatcctcaagtcacgcatcgtcacctgggagccctcagaagagtttgtcaggaacaaccacgtcattaacacccctcttcagacaatgcacatcatggcagacctggggccctataaaaagcttggctataagaagtatgaacatgtcctgtgtactctgaaggtggatagcaatggtgtgatcacagtaaagcctgacttcacgggcctcaaaggaccctacaggattgagacggagggggagaagcaggagctgtggaaatatacgatcgacaatgtttccccccacgcacagccggaggaggaggagcgggaacggcgagtgttcaaggatctttatggccggcacaaggagtatctcagcagcctcgtaggcaccgactttgagatgactgtcccaggtgccctccggctctttgtaaatggagaggtcgtttcagcccaaggctatgagtatgacaatctctacgtccacttctttgtagaattgccaactgctcactggtcaagcccagcattccagcagctctcaggagtaacacagacctgcaccaccaagtccctggcaatggacaaggtggctcacttctcctacccattcacgtttgaagccttcttcctccatgaggatgaatcttctgatgcactcccggagtggcctgtgctctactgtgaggtcctctcgctggacttctggcagaggtaccgtgtggaaggctatggggctgtggtgctgcctgccactccaggctcacacaccctgacagtctccacgtggagacctgtggagcttggcacggtggctgagctgaggaggtttttcattggcggttctctggaactggaggacctctcctatgtacggataccaggatccttcaagggggaacgcctgagccgctttggactccgcacagagaccacaggcactgtcaccttccgcttgcactgtctgcagcagtccagggccttcatggaatcgagctcccttcagaaaaggatgcggagtgtgttggaccgtctggaagggttcagccagcagagttccattcacaatgtgctagaggccttccgtcgagcccggcgccgcatgcaggaggcccgggaaagcctcccgcaggacctagtgagcccctctggaaccctggtctcctag

SEQ ID NO: 621 - DNA, 939 bp, Homo sapiens
  source 1..939: mol_type = genomic DNA
atgcggatgctgctggcgctcctggccctctccgcggcgcggccatcggccagtgcagagtcacactggtgctacgaggttcaagccgagtcctccaactacccctgcttggtgccagtcaagtggggtggaaactgccagaaggaccgccagtcccccatcaacatcgtcaccaccaaggcaaaggtggacaaaaaactgggacgcttcttcttctctggctacgataagaagcaaacgtggactgtccaaaataacgggcactcagtgatgatgttgctggagaacaaggccagcatttctggaggaggactgcctgccccataccaggccaaacagttgcacctgcactggtccgacttgccatataagggctcggagcacagcctcgatggggagcactttgccatggagatgcacatagtacatgagaaagagaaggggacatcgaggaatgtgaaagaggcccaggaccctgaagacgaaattgcggtgctggcctttctggtggaggctggaacccaggtgaacgagggcttccagccactggtggaggcactgtctaatatccccaaacctgagatgagcactacgatggcagagagcagcctgttggacctgctccccaaggaggagaaactgaggcactacttccgctacctgggctcactcaccacaccgacctgcgatgagaaggtcgtctggactgtgttccgggagcccattcagcttcacagagaacagatcctggcattctctcagaagctgtactacgacaaggaacagacagtgagcatgaaggacaatgtcaggcccctgcagcagctggggcagcgcacggtgataaagtccggggccccgggtcggccgctgccctgggccctgcctgccctgctgggccccatgctggcctgcctgctggccggcttcctgcgatga

SEQ ID NO: 622 - DNA, 2025 bp, Homo sapiens
  source 1..2025: mol_type = genomic DNA
atgacaatccgacaccaaggccagcagtacaggccgaggatggcatttctccaaaagattgaagcgctcgtgaaggacatgcagaacccagagacaggggtccgaatgcagaaccagagggtcctggtcaccagcgttcctcatgccatgacaggaagtgatgttctgcaatggatcgtccagcggctttggatctccagtctggaggcacagaacttgggcaactttattgtcaggtatggctacatttaccccctgcaagaccccaagaatctcattctcaagcctgatggcagcctctacagatttcagacaccgtatttctggcccacccagcagtggccagctgaagataccgattacgccatctatctggccaagcgaaatatcaaaaagaaagggattttggaagaatatgaaaaggaaaattacaatttcttgaaccaaaaaatgaactataagtgggactttgtcattatgcaggccaaagagcagtacagggctggaaaggagaggaacaaagcagacagatatgccctggactgccaggagaaggcatactggctggtgcaccgatgccctcctggaatggacaatgtgctggactacggcctggaccgagtgaccaatccgaatgaagtcaaggtaaaccagaaacaaacagtcgttgctgtcaaaaaagagatcatgtattaccaacaggccttgatgaggtccacagtgaagtcttctgtgtccctgggagggattgtgaaatacagtgagcagttctcatccaacgatgccatcatgtcaggctgcctccccagcaacccctggatcaccgatgacacccagttctgggacttaaatgccaaattggtggaaatcccaaccaagatgcgagtggaacgatgggccttcaacttcagcgaattgatccgagaccccaaaggtcgacagagcttccagtacttcctcaagaaagaattcagtggagagaatctgggattctgggaagcctgcgaggatctgaagtatggagatcagtccaaagtcaaggagaaagcagaggagatttacaagctgttcctggccccgggggcgaggcgctggatcaacatagatggcaaaaccatggacatcacagtgaaggggctgaagcacccccaccgctatgtgctggacgccgcacaaacccacatttacatgctcatgaagaaggattcttatgctcgctatttaaaatctccgatctataaggacatgctggccaaagctattgaacctcaggaaaccaccaagaaaagctccaccctcccttttatgcggcgtcacctgcgctccagcccaagccctgtcatcctgagacagctggaagaggaagccaaggcccgagaagcagccaacactgtggacatcacccagccgggccagcacatggctcccagcccccatctgaccgtgtacaccgggacctgcatgcccccgtctccttctagccccttctcctcctcctgccgctcccccaggaagcctttcgcctcacccagccgcttcatccggcgacccagcaccaccatctgcccctcacccatcagagtggccttggagagctcatcgggcttggagcagaaaggggagtgcagcgggtccatggccccccgtgggccctctgtcaccgagagcagcgaggcctccctcgacacctcctggcctcgcagccggcccagggcccctcctaaggcccgcatggctctgtccttcagcaggtttctgagacgaggctgtctggcctcacctgtctttgccaggctctcacccaagtgccctgctgtgtcccacgggagggtgcagcccctgggggacgtgggccagcagctgccacgattgaaatccaagagagtagcaaactttttccagatcaaaatggatgtgcccacggggagcgggacctgcttgatggactcggaggatgctggaacaggagagtcgggtgaccgggccacagaaaaggaggtcatctgcccctgggagagcctgtaa

SEQ ID NO: 623 - DNA, 1578 bp, Homo sapiens
  source 1..1578: mol_type = genomic DNA
atgggctggctttttctaaaggttttgttggcgggagtgagtttctcaggatttctttatcctcttgtggatttttgcatcagtgggaaaacaagaggacagaagccaaactttgtgattattttggccgatgacatggggtggggtgacctgggagcaaactgggcagaaacaaaggacactgccaaccttgataagatggcttcggagggaatgaggtttgtggatttccatgcagctgcctccacctgctcaccctcccgggcttccttgctcaccggccggcttggccttcgcaatggagtcacacgcaactttgcagtcacttctgtgggaggccttccgctcaacgagaccaccttggcagaggtgctgcagcaggcgggttacgtcactgggataataggcaaatggcatcttggacaccacggctcttatcaccccaacttccgtggttttgattactactttggaatcccatatagccatgatatgggctgtactgatactccaggctacaaccaccctccttgtccagcgtgtccacagggtgatggaccatcaaggaaccttcaaagagactgttacactgacgtggccctccctctttatgaaaacctcaacattgtggagcagccggtgaacttgagcagccttgcccagaagtatgctgagaaagcaacccagttcatccagcgtgcaagcaccagcgggaggcccttcctgctctatgtggctctggcccacatgcacgtgcccttacctgtgactcagctaccagcagcgccacggggcagaagcctgtatggtgcagggctctgggagatggacagtctggtgggccagatcaaggacaaagttgaccacacagtgaaggaaaacacattcctctggtttacaggagacaatggcccgtgggctcagaagtgtgagctagcgggcagtgtgggtcccttcactggattttggcaaactcgtcaagggggaagtccagccaagcagacgacctgggaaggagggcaccgggtcccagcactggcttactggcctggcagagttccagttaatgtcaccagcactgccttgttaagcgtgctggacatttttccaactgtggtagccctggcccaggccagcttacctcaaggacggcgctttgatggtgtggacgtctccgaggtgctctttggccggtcacagcctgggcacagggtgctgttccaccccaacagcggggcagctggagagtttggagccctgcagactgtccgcctggagcgttacaaggccttctacattaccggtggagccagggcgtgtgatgggagcacggggcctgagctgcagcataagtttcctctgattttcaacctggaagacgataccgcagaagctgtgcccctagaaagaggtggtgcggagtaccaggctgtgctgcccgaggtcagaaaggttcttgcagacgtcctccaagacattgccaacgacaacatctccagcgcagattacactcaggacccttcagtaactccctgctgtaatccctaccaaattgcctgccgctgtcaagccgcataa

SEQ ID NO: 624 - DNA, 1386 bp, Homo sapiens
  source 1..1386: mol_type = genomic DNA
atgaacgaccagtaccaccgggcagcccgggatggctacctggagctcctcaaggaggccacccgaaaggagctgaatgcccccgacgaggatggcatgacccccactctctgggctgcctaccatggcaacctcgagtcgctgcgtctcattgtgagccgcgggggtgacccggacaagtgtgacatctggggcaacacacccctgcatctggcagcttccaatggccacttgcactgcctgtccttcctggtgtccttcggagccaacatctggtgcctagacaacgactaccacacgccgctggacatggctgccatgaagggccacatggaatgcgtgcgctacctggactccatcgcggccaagcagagcagcctcaaccccaagctggtgggtaagctgaaggacaaggccttccgcgaggcggagcggcgcatccgcgagtgcgccaagctgcagcggaggcaccacgaacgcatggagcggcgataccggcgcgagctggccgagcgttccgacaccctcagcttctccagcctcacgtccagcaccctgagccgccggctgcagcatctggcgctgggcagccacctgccgtactctcaggccacgctgcacggcacggccaggggcaagaccaagatgcagaagaagctggagcggcgcaagcagggcggcgaaggcaccttcaaggtctccgaggatgggcgcaagagcgcccgctcgctctcgggcctgcagctgggcagcgacgtgatgttcgtgcgccagggcacctacgccaatcccaaggagtggggccgagccccgctccgggacatgttcctctcggacgaggacagcgtctcccgtgccacgctggcggccgagcctgcccactcggaggtcagcaccgactcaggccacgactccctgtttacccgccccggcctgggcaccatggtgttccgcagaaattacttgagcagtgggctgcacggactgggccgcgaggatgggggtctggatggggtgggagcgccgcggggtcggctgcagagctcccccagcctggacgatgacagcctgggcagtgccaacagcctgcaggaccgcagctgtggggaggagctgccctgggatgagctcgatttaggcttggacgaggacctggagcccgagactagcccgctggagaccttcctggcctctctgcacatggaggactttgccgccctcctgcggcaggagaagatcgacctcgaggctttgatgctgtgctctgacctcgacctccgcagcatcagcgtcccactggggccccgaaagaagatcttgggggccgtgaggaggcggcggcaggcgatggagcgcccgccggccctggaggacacagagctataa

SEQ ID NO: 625 - DNA, 165 bp, Homo sapiens
  source 1..165: mol_type = genomic DNA
atgtgcaccacccttttcctgctcagcaccctggccatgctctggcgccgccgatttgccaaccgagtccaaccagagcccagcgacgtggatggggcagctaggggcagcagcttggatgcggaccctcagtcctcaggcagggagaaagaacctctgaagtaa

SEQ ID NO: 626 - DNA, 1479 bp, Homo sapiens
  source 1..1479: mol_type = genomic DNA
atgccgacgaacggcctgcaccaggtgctgaagatccagtttggcctcgtcaacgacactgaccgctacctgacagctgagagcttcggcttcaaggtcaatgcctcggcacccagcctcaagaggaagcagacctgggtgctggaacccgacccaggacaaggcacggctgtgctgctccgcagcagccacctgggccgctacctgtcggcagaagaggacgggcgcgtggcctgtgaggcagagcagccgggccgtgactgccgcttcctggtcctgccgcagccagatgggcgctgggtgctgcggtccgagccgcacggccgcttcttcggaggcaccgaggaccagctgtcctgcttcgccacagccgtttccccggccgagctgtggaccgtgcacctggccatccacccgcaggcccacctgctgagcgtgagccggcggcgctacgtgcacctgtgcccgcgggaggacgagatggccgcagacggagacaagccctggggcgtggacgccctcctcaccctcatcttccggagccgacggtactgcctcaagtcctgtgacagccgctacctgcgcagcgacggccgtctggtctgggagcctgagccccgtgcctgctacacgctggagttcaaggcgggcaagctggccttcaaggactgcgacggccactacctggcacccgtggggcccgcaggcaccctcaaggccggccgaaacacgcgacctggcaaggatgagctctttgatctggaggagagtcacccacaggtggtgctggtggctgccaaccaccgctacgtctctgtgcggcaaggggtcaacgtctcagccaatcaggatgatgaactagaccacgagaccttcctgatgcaaattgaccaggagacaaagaagtgcaccttctattccagcactgggggctactggaccctggtcacccatgggggcattcacgccacagccacacaagtttctgccaacaccatgtttgagatggagtggcgtggccggcgggtagcactcaaagccagcaacgggcgctacgtgtgcatgaagaagaatgggcagctggcggctatcagcgattttgtcggcaaggacgaagagttcaccctcaagctcatcaaccggcccatcctggtgctgcgcggcctggacggcttcgtctgccaccaccgcggctccaaccagctggacaccaaccgctccgtctacgacgtcttccacctgagcttcagcgacggcgcctaccggatccgaggccgcgacggagggttctggtacacgggcagccacggcagcgtgtgcagcgacggcgaacgcgccgaggacttcgtcttcgagttccgtgagcgcggccgcctggccatccgcgcccggagcggcaagtacctgcgcggcggcgcctcgggcctgctgcgggccgatgccgacgccccggccgggaccgcgctttgggagtactga

SEQ ID NO: 627 - DNA, 264 bp, Homo sapiens
  source 1..264: mol_type = genomic DNA
atgaacctggaaccgcccaaggctgagttccggtcagccaccagggtggccgggggacctgtcacccccaggaaagggccccctaaatttaagcagcgacagaccaggcagttcaagagcaagcccccaaagaaaggcgttcaagggtttggggacgacatccctggaatggaaggcctgggaacagacatcacagtcatctgcccttgggaggccttcaaccacctggagctgcacgagctggcccaatatggcatcatctag

SEQ ID NO: 628 - DNA, 9228 bp, Homo sapiens
  source 1..9228: mol_type = genomic DNA
atgcgcgggggcgtgctcctggtcttgctgctgtgtgtcgccgcgcagtgccggcagagaggcctgtttcctgccattctcaatcttgccagcaatgctcacatcagcaccaatgccacctgtggcgagaaggggccggagatgttctgcaaacttgtggagcatgtgccaggtcggcccgtccgaaacccacagtgccggatctgtgatggcaacagcgcaaaccccagagaacgccatccaatatcacatgccatagatggcaccaataactggtggcaaagtcccagcattcagaatgggagagaatatcactgggtcacaatcactctggacttaagacaggtctttcaagttgcatatgtcatcattaaagctgccaatgcccctcgacctggaaactggattttggagcgttctctggatggcaccacgttcagcccctggcagtattatgcagtcagcgactcagagtgtttgtctcgttacaatataactccaagacgagggccacccacctacagggctgatgatgaagtgatctgcacctcctattattccagattggtgccacttgagcatggagagattcatacatcactcatcaatggcagaccaagcgctgacgatctttcacccaagttgttggaattcacttctgcacgatatattcgccttcgcttgcaacgcattagaacgctcaatgcagatctcatgacccttagccaccgggaacctaaagaactggatcctattgttaccagacgctattattattcaataaaggacatttctgttggaggcatgtgtatctgctatggccatgctagtagctgcccatgggatgaaactacaaagaaactgcagtgtcaatgtgagcataatacttgcggggagagctgtaacaggtgctgtcctgggtaccatcagcagccctggaggccgggaaccgtgtcctccggcaatacatgtgaagcatgtaattgtcacaataaagccaaagactgttactatgatgaaagtgttgcaaagcagaagaaaagtttgaatactgctggacagttcagaggaggaggggtttgcataaattgcttgcagaacaccatgggaatcaactgtgaaacctgtattgatggatattatagaccacacaaagtgtctccttatgaggatgagccttgccgcccctgtaattgtgaccctgtggggtccctcagttctgtctgtattaaggatgacctccattctgacttacacaatgggaagcagccaggtcagtgcccatgtaaggaaggttatacaggagaaaaatgtgatcgctgccaacttggctataaggattacccgacctgtgtctcctgtgggtgcaacccagtgggcagtgccagtgatgagccctgcacagggccctgtgtttgtaaggaaaacgttgaggggaaggcctgtgatcgctgcaagccaggattctataacttgaaggaaaaaaacccccggggctgctccgagtgcttctgctttggcgtttctgatgtctgcagcagcctctcttggcctgttggtcaggtaaacagtatgtccgggtggctggtcaccgacttgatcagtcccaggaagatcccgtctcagcaagatgcactaggcgggcgccatcaggtcagcatcaacaacaccgcggtcatgcagagactggctcccaagtactactgggcagcccccgaggcctaccttggaaataagctgactgcgtttggcggattcctgaaatacacggtgtcctacgatattccggtagagacggtagacagtaacctcatgtcgcatgctgacgtcatcattaagggaaacggactcactttaagcacacaggctgagggtctgtcattgcagccttatgaagagtacctaaacgtggttagacttgtgcctgaaaacttccaagattttcacagcaaaaggcagattgatcgtgaccagctgatgactgtccttgccaatgtgacacatcttttgatcagagccaactacaattctgcaaaaatggctctttacaggttggagtccgtctctctggacatagccagctctaatgccatcgacctggtggtggccgctgatgtggagcactgtgaatgtccgcaaggctacacagggacctcctgtgagtcgtgcctctctggctattaccgcgtggatggaatactctttggaggaatttgtcaaccctgtgaatgccacggccatgcagctgagtgtaatgttcacggcgtttgcattgcgtgtgcgcacaacaccaccggcgtccactgtgagcagtgcttgcccggcttctacggggagccttcccgagggacacctggggactgccagccctgcgcctgccctctcaccatagcctccaacaatttcagccccacctgccacctcaatgatggagatgaagtggtctgtgactggtgtgccccgggctactcaggagcttggtgtgagagatgtgcagatggttactatggaaacccaacagtgcctggcgaatcttgtgttccctgtgactgcagcggcaacgtggacccctcggaggctggtcactgtgactcagtcaccggggagtgcctgaagtgcctggggaacacagatggcgcccactgtgaaaggtgtgctgacgggttctatggggacgctgtgacagccaagaactgccgcgcctgtgaatgccatgtgaaaggctcccattctgccgtgtgccatcttgagaccgggctctgtgactgcaaaccaaacgtgactggacagcagtgtgaccagtgcttgcatggctattatgggctggactcaggccatggctgccggccctgcaactgcagcgtggcaggctccgtgtcagatggctgcacggatgaaggccagtgtcactgtgtcccaggtgtggcagggaaaaggtgtgacaggtgtgcccatggcttctacgcctaccaggatggtagctgtacaccctgtgactgcccacacactcagaatacctgcgacccagaaactggagagtgtgtctgcccccctcacacacagggtgtgaagtgtgaagaatgtgaggatgggcactggggctacgatgcggaggtggggtgccaggcctgcaattgcagtctcgtggggtcgactcatcatcggtgcgatgtggtcaccggccattgccagtgcaagtcaaaatttggtggccgggcctgcgatcagtgttccttgggttacagagactttcccgactgtgttccctgtgactgtgacctgagggggacgtcgggggacgcctgcaacctggagcagggtctctgcggctgtgtggaggaaaccggggcctgcccttgcaaggaaaatgtctttggtcctcagtgcaacgaatgtcgagagggcaccttcgctctccgcgcagacaaccccctgggctgcagcccgtgcttctgctccgggctgtcccacctctgctcagagctggaggactacgtgaggaccccagtaacgctgggctccgatcagcctcttctgcgtgtggtttctcagagtaacttgaggggcacgaccgagggggtttactaccaggcccccgacttcctgctggatgccgccaccgtccggcagcacatccgtgcagagccgttttactggcggctgccgcagcagttccaaggagaccagctcatggcctatggtggcaaactgaagtacagcgtggccttctattctttggatggcgtcggcacctccaattttgagcctcaagttctcatcaaaggtggtcggatcagaaagcaagtcatttacatggatgcaccagccccagagaatggagtgagacaggaacaagaagtagcaatgagagagaatttttggaaatattttaactctgtttctgaaaaacctgtcacgcgagaggattttatgtctgtcctcagcgatattgagtacatcctcatcaaggcatcgtatggtcaaggattacagcagagcagaatctcagacatttcaatggaggttggcagaaaggctgaaaagctgcacccagaagaagaggttgcatctcttttagagaattgtgtctgtcctcctggcactgtgggattctcatgtcaggactgcgcccctgggtaccacagagggaagctcccagcagggagtgacaggggaccacgccctctggttgctccttgtgttccctgcagttgcaacaaccacagtgacacctgtgaccccaacaccgggaagtgtctgaactgtggcgataacacagcaggtgaccattgtgatgtgtgtacttctggctactacgggaaggtgactggctcagcaagtgactgtgctctgtgtgcctgtcctcacagccctcctgccagttttagtcccacttgtgtcttggaaggggaccacgatttccgttgtgacgcctgtctcctgggctatgaaggaaaacactgtgaaaggtgctcctcaagctattatgggaaccctcaaacaccaggtggcagttgccagaagtgtgactgcaacccgcacggctctgtccacggtgactgtgaccgcacatctgggcagtgcgtttgcaggctgggggcctcggggctccggtgcgatgagtgtgaaccgaggcacattctgatggaaacagattgtgtttcctgtgatgatgagtgtgtaggtgtgctgctgaatgacttggatgagattggtgatgccgttctttctctgaacctcactggcattatccctgtcccatatggaattttgtcaaacctggaaaatacaactaaatatctccaggaatctttattaaaagaaaatatgcaaaaggacctgggaaaaattaagcttgaaggtgttgcagaagaaacggacaacctgcaaaagaagctcactaggatgttagcgagtacccaaaaggtgaatagggcaactgagagaatcttcaaggagagtcaagacctggccatagccattgagaggctgcagatgagcatcacagaaattatggaaaagacaactttaaatcagactttggatgaagatttcctactacccaattctactcttcagaacatgcaacagaatggtacatctttgctagaaatcatgcagataagagacttcacacagttgcaccaaaatgccacccttgaactcaaggctgctgaagatttattgtcacaaattcaggaaaattaccagaagccgctggaagaattggaggtattgaaagaagcagcaagccacgtcctttcaaagcacaacaatgaactaaaggcggctgaggcgctcgtgagggaagctgaggcaaagatgcaggaaagcaaccacctgctgctcatggtcaatgctaatctgagagaattcagtgataaaaagctgcatgttcaagaagaacaaaatctgacctcagagctcattgtccaaggaagaggattgatagatgctgctgctgcacaaacagatgctgtacaagatgctctagagcacttagaggatcaccaggataagctacttttatggtctgccaaaatcaggcaccacatagatgacctggtcatgcacatgtcccaaaggaacgcagtcgacctggtctacagagctgaggaccatgccgctgagttccagagactagcagatgttctgtacagtggccttgaaaacatcagaaatgtgtccctgaatgccaccagtgcagcctatgtccattacaacatccagagcctgattgaagaatcggaggaactggccagagatgctcacaggactgtgactgagacgagcctgctctcagaatcccttgtttctaacgggaaagcggccgtgcagcgcagctccagatttctaaaagaaggcaacaacctcagcaggaagcttccaggtattgcattggaactgagtgaattgagaaataagacaaacagatttcaagagaatgctgttgaaattaccaggcaaaccaatgaatcactcttgatacttagagcaattcctaaaggtataagagacaagggagccaaaaccaaagagctggccacgtctgcaagccagagcgcggtgagcacgctgagggacgtggcggggctgagccaggagctgctgaacacatctgccagcctgtccagggtcaacaccacattacgagagacacaccagcttctgcaggactccaccatggccactctgttggctggaagaaaagtcaaagacgtggaaattcaagccaaccttttgtttgatcggttgaagcctttgaagatgttagaggagaatctgagcagaaacctatcagaaattaaactgttgatcagccaggcccgcaaacaagcagcttctattaaagtcgccgtgtctgcagacagagattgcatccgggcctaccagcctcagatttcctctaccaactacaataccttaacactaaatgttaagacacaggaacccgataatcttctcttctacctcggtagcagcaccgcttctgatttccttgcagtggagatgcggcgagggagagtggccttcctgtgggacctgggctccgggtccacacgcttggagtttccagactttcccattgatgacaacagatggcacagtatccatgtagccagatttggaaacattggttcactgagtgtaaaggaaatgagctcaaatcaaaagtcaccaacaaaaacaagtaaatcccctgggacagctaatgttctggatgtaaacaattcaacactcatgtttgttggaggtcttggaggacaaatcaagaaatctcctgctgtgaaggttactcattttaaaggctgcttgggggaggccttcctgaatggaaaatccataggcctatggaactatattgaaagggaaggcaagtgccgtgggtgcttcggaagctcccagaatgaagacccttccttccattttgacgggagtgggtactctgtcgtggagaagtcacttccggctaccgtgacccagataatcatgctttttaataccttttcacctaatggacttcttctctacctgggttcatacggcacaaaagactttttatccatcgagctgtttcgtggcagagtgaaggttatgactgacctgggttcaggacccattacccttttgacagacagacgttataacaatggaacctggtacaaaattgccttccagcgaaaccggaagcaaggagtgctagcagttatcgatgcctataacaccagtaataaagaaaccaagcagggcgagactccgggagcatcttctgacctcaaccgcctagacaaggacccgatttatgtgggtggattaccaaggtcaagagttgtaaggagaggtgtcaccaccaaaagctttgtgggctgcatcaagaacctggaaatatccagatcaacctttgacttactcagaaattcctatggagtgagaaaaggctgtttactggagcccatccggagtgttagcttcctgaaaggcggctacattgaattgccacccaaatctttgtcaccagaatcagaatggctggtaacatttgccaccacgaacagcagtggcatcatcctggctgccctcggcggggatgtggagaagcggggtgatcgtgaggaagcacacgtgcccttcttttccgtcatgctgatcggaggcaacattgaggtacatgtcaatcctggggatgggacaggcctgagaaaagctctcctgcacgctcccacgggtacctgcagtgatggacaagcgcattccatctccttggtcaggaatcggagaattatcactgtccaattggatgagaacaatcctgtggaaatgaagttgggcacattagtagaaagcaggacgataaatgtgtccaatctgtacgtcgggggaattccagagggagaggggacgtcactgctcacaatgagaagatcgttccatggctgtatcaaaaacctgatcttcaatttggaacttttggatttcaacagtgcagttggccatgagcaagtcgacctggacacctgctggctgtcagaaaggcctaagctggctcccgatgcagaggacagcaagctcttgccagagccccgggcttttccagaacagtgtgtggtggatgcagctctggagtacgttcccggcgctcaccagtttggtctcacacaaaacagccatttcatcttgccttttaatcagtcggctgtcagaaagaagctctcggttgagctaagcatccgcacgttcgcctccagcggcctgatttactacatggctcatcagaaccaagcagactacgctgtgctccagctgcacgggggccgcctccacttcatgtttgaccttggcaaaggcagaacaaaggtctctcaccctgcactgctcagtgatggcaagtggcacacggtcaagacagactatgttaaaagaaaaggcttcataactgtcgacggccgagagtctcccatggtgactgtggtgggagatggaaccatgctggatgtggagggtttgttctacctaggaggcctgccctcccagtaccaggccaggaaaattggaaatatcacccacagcatccctgcctgcattggggatgtgacggttaacagcaaacagctggacaaggacagcccggtgtctgccttcacggtgaacaggtgctacgcagtggcccaggaaggaacatactttgacggaagcggatatgcagctcttgtcaaagagggctacaaagtccagtcagatgtgaacatcacactggagtttcgaacctcctcgcagaatggcgtcctcctggggatcagcactgccaaagtggatgccattggactagagcttgtggacggcaaggtcttgttccatgtcaacaatggtgctggcaggataacagctgcatatgagcccaaaaccgccactgtgctctgtgatggaaaatggcacactcttcaagctaacaaaagcaaacaccgtatcactctgattgttgacgggaacgcagttggcgctgaaagtccacacacccagtctacctcagtggacaccaacaatcccatttatgttggtggctatcctgctggtgtgaagcaaaaatgcctgcgcagccagacctcgttccgcgggtgtttgaggaagctagctctgattaagagcccgcaggtgcagtcctttgacttcagcagagcgttcgaactgcacggagttttccttcattcctgtcctgggaccgagtcctga

SEQ ID NO: 629 - DNA, 2394 bp, Homo sapiens
  source 1..2394: mol_type = genomic DNA
atggcgcaccgctgtttgcggctgtggggccggggcggctgctggccccgcggcctacagcagctcctcgtgcctggcggcgtgggcccgggcgagcagccctgcctccggacgctttaccgatttgttacaactcaagcaagggccagcagaaattctcttttgacagatataattgctgcttatcaaagattctgttctcgacccccaaaaggatttgaaaaatactttcctaatggaaaaaatggaaaaaaagctagtgaacctaaagaagttatgggagagaaaaaagaatcaaagccagctgctaccacacgctcttctggaggaggaggtggtggcggtggaaaacgaggtggcaagaaagatgattctcactggtggtccaggtttcagaagggtgacattccatgggacgacaaggatttcaggatgttcttcctctggactgctctgttctggggtggagtcatgttttacttgctgctcaagagatccgggagagaaatcacttggaaggactttgtcaataactatctttcaaaaggagtagtagacagattggaagtcgtcaacaagcgttttgttcgagtgacctttacaccaggaaaaactcctgttgatgggcaatacgtttggtttaatattggcagtgtggacacctttgaacggaatctggaaactttacagcaggaattgggcatagaaggagaaaatcgggtgcctgttgtctacattgctgaaagtgatggctcttttctgctgagcatgctgcctacggtgctcatcatcgccttcttgctctacaccatcagaagagggcctgctggcattggccggacaggccgagggatgggcggactcttcagtgtcggagaaaccactgccaaggtcttaaaggatgaaattgatgtgaagttcaaagatgtggctggctgtgaggaggccaagctagagatcatggaatttgtgaatttcttgaaaaacccaaagcagtatcaagacctaggagcaaaaatcccaaagggtgccattctcactggtcctccaggcactgggaagacgctgctagctaaggccacagccggagaagccaatgtccccttcatcaccgttagtggatctgagtttttggagatgttcgttggtgtgggccctgctagagtccgagacttatttgcccttgctcggaagaatgccccttgcatcctcttcatcgatgaaatcgatgcggtgggaaggaagagaggaagaggcaactttggagggcagagtgagcaggagaacacactcaaccagctgctggtggagatggatggttttaatacaacaacaaatgtcgtcattttggccggcaccaatcgaccagatatcctggaccccgcgctgcttaggccggggcgtttcgacaggcagatctttattggaccaccagacataaaaggaagagcttctattttcaaagttcatctccgaccgctaaaactggacagtaccctggagaaggataaattggcaagaaaactggcatctttaactccagggttttcaggtgctgatgttgctaatgtctgtaatgaagctgcgttgattgctgcaaggcatctgtcagattccataaatcagaaacactttgaacaggcaattgaacgagtgattggtggcttagagaagaaaacgcaggttctgcagcctgaggagaagaagactgtggcataccacgaagcaggccatgcggttgccggctggtatctggagcacgcagacccgcttttaaaggtatccatcatcccacgtggcaaaggactaggttatgctcagtatttaccaaaagaacaatacctctataccaaagagcagctcttggataggatgtgtatgactttaggtggtcgagtctctgaagaaatcttctttggaagaattacaactggtgctcaagatgacttgagaaaagtaactcagagtgcatatgcccaaattgttcagtttggcatgaatgaaaaggttgggcaaatctcctttgacctcccacgtcagggggacatggtattggagaaaccttacagtgaagccactgcaagattgatagatgatgaagtacgaatacttattaatgatgcttataaaagaacagtagctcttctcacagaaaagaaagctgacgtggagaaggttgctcttctgttgttagaaaaagaagtattagataagaatgatatggttgaacttttgggccccagaccatttgcggaaaaatctacctatgaagaatttgtggaaggcactggcagcttggatgaggacacctcacttccagaaggccttaaggactggaacaaggagcgggaaaaggagaaagaggagcccccgggtgagaaagttgccaactag

SEQ ID NO: 630 - DNA, 900 bp, Homo sapiens
  source 1..900: mol_type = genomic DNA
atgatggcgtatatgaacccggggccccactattctgtcaacgccttggccctaagtggccccagtgtggatctgatgcaccaggctgtgccctacccaagcgcccccaggaagcagcggcgggagcgcaccaccttcacccggagccaactggaggagctggaggcactgtttgccaagacccagtacccagacgtctatgcccgtgaggaggtggctctgaagatcaatctgcctgagtccagggttcaggtttggttcaagaaccggagggctaaatgcaggcagcagcgacagcagcagaaacagcagcagcagcccccagggggccaggccaaggcccggcctgccaagaggaaggcgggcacgtccccaagaccctccacagatgtgtgtccagaccctctgggcatctcagattcctacagtccccctctgcccggcccctcaggctccccaaccacggcagtggccactgtgtccatctggagcccagcctcagagtcccctttgcctgaggcgcagcgggctgggctggtggcctcagggccgtctctgacctccgccccctatgccatgacctacgccccggcctccgctttctgctcttccccctccgcctatgggtctccgagctcctatttcagcggcctagacccctacctttctcccatggtgccccagctagggggcccggctcttagccccctctctggcccctccgtgggaccttccctggcccagtcccccacctccctatcaggccagagctatggcgcctacagccccgtggatagcttggaattcaaggaccccacgggcacctggaaattcacctacaatcccatggaccctctggactacaaggatcagagtgcctggaagtttcagatcttgtag

SEQ ID NO: 631 - DNA, 636 bp, Homo sapiens
  source 1..636: mol_type = genomic DNA
atggacggcctgaggcagcgcgtggagcacttcctggagcaaaggaacctggtcaccgaagtgctgggggcgctggaggccaagaccggggtggagaagcggtatctggctgcaggagccgtcactctgctaagcctgtatctgctgttcggctacggagcgtctctgctgtgcaatctcatcggatttgtgtaccccgcatatgcctcaatcaaagctatcgagagcccaagcaaggacgacgacactgtgtggctcacctactgggtggtgtacgccctgtttgggctggccgagttcttcagcgatctactcctgtcctggttccctttctactacgtgggcaagtgcgccttcctgttgttctgcatggctcccaggccctggaacggggctctcatgctgtatcagcgcgtcgtgcgtccgctgttcctaaggcaccacggggccgtagacagaatcatgaacgacctcagcgggcgagccctggacgcggcggccggaataaccaggaacgtcttgcaggtcctggcccgtagccgggcaggcatcaccccggtggctgtggccgggccctccactcccctggaagctgacctcaagccaagccagaccccgcagccgaaggacaagtga

SEQ ID NO: 632 - DNA, 555 bp, Homo sapiens
  source 1..555: mol_type = genomic DNA
atgttcctgagcccgggcgaggggccggcaaccgagggtgggggtctggggccgggcgaggaggcccccaagaagaagcaccggaggaaccgcaccaccttcaccacctaccagctgcaccagctggagcgggcgttcgaggcctctcactacccggatgtgtacagccgtgaggagctggcagccaaggtgcacctacctgaggtgcgcgtgcaggtgtggttccagaaccgccgggccaagtggcgccgccaggagcggctggagtcaggctcgggtgccgtggcagctccgagactccccgaggccccagcgctgccgttcgcccgccccccggccatgtcgctgcccctggagccctggttgggccccggaccgccggccgtgccaggcctcccccgcctcctgggcccgggcccggggctgcaagcgtccttcgggcctcatgcctttgctcccaccttcgcagatggcttcgccctggaggaggcgtccctgcggctgctggccaaggaacatgcacaggctctggacagggcctggccgccagcctga

SEQ ID NO: 633 - DNA, 4992 bp, Homo sapiens
  source 1..4992: mol_type = genomic DNA
atgggacccacctcaggtcccagcctgctgctcctgctactaacccacctccccctggctctggggagtcccatgtactctatcatcacccccaacatcttgcggctggagagcgaggagaccatggtgctggaggcccacgacgcgcaaggggatgttccagtcactgttactgtccacgacttcccaggcaaaaaactagtgctgtccagtgagaagactgtgctgacccctgccaccaaccacatgggcaacgtcaccttcacgatcccagccaacagggagttcaagtcagaaaaggggcgcaacaagttcgtgaccgtgcaggccaccttcgggacccaagtggtggagaaggtggtgctggtcagcctgcagagcgggtacctcttcatccagacagacaagaccatctacacccctggctccacagttctctatcggatcttcaccgtcaaccacaagctgctacccgtgggccggacggtcatggtcaacattgagaacccggaaggcatcccggtcaagcaggactccttgtcttctcagaaccagcttggcgtcttgcccttgtcttgggacattccggaactcgtcaacatgggccagtggaagatccgagcctactatgaaaactcaccacagcaggtcttctccactgagtttgaggtgaaggagtacgtgctgcccagtttcgaggtcatagtggagcctacagagaaattctactacatctataacgagaagggcctggaggtcaccatcaccgccaggttcctctacgggaagaaagtggagggaactgcctttgtcatcttcgggatccaggatggcgaacagaggatttccctgcctgaatccctcaagcgcattccgattgaggatggctcgggggaggttgtgctgagccggaaggtactgctggacggggtgcagaacccccgagcagaagacctggtggggaagtctttgtacgtgtctgccaccgtcatcttgcactcaggcagtgacatggtgcaggcagagcgcagcgggatccccatcgtgacctctccctaccagatccacttcaccaagacacccaagtacttcaaaccaggaatgccctttgacctcatggtgttcgtgacgaaccctgatggctctccagcctaccgagtccccgtggcagtccagggcgaggacactgtgcagtctctaacccagggagatggcgtggccaaactcagcatcaacacacaccccagccagaagcccttgagcatcacggtgcgcacgaagaagcaggagctctcggaggcagagcaggctaccaggaccatgcaggctctgccctacagcaccgtgggcaactccaacaattacctgcatctctcagtgctacgtacagagctcagacccggggagaccctcaacgtcaacttcctcctgcgaatggaccgcgcccacgaggccaagatccgctactacacctacctgatcatgaacaagggcaggctgttgaaggcgggacgccaggtgcgagagcccggccaggacctggtggtgctgcccctgtccatcaccaccgacttcatcccttccttccgcctggtggcgtactacacgctgatcggtgccagcggccagagggaggtggtggccgactccgtgtgggtggacgtcaaggactcctgcgtgggctcgctggtggtaaaaagcggccagtcagaagaccggcagcctgtacctgggcagcagatgaccctgaagatagagggtgaccacggggcccgggtggtactggtggccgtggacaagggcgtgttcgtgctgaataagaagaacaaactgacgcagagtaagatctgggacgtggtggagaaggcagacatcggctgcaccccgggcagtgggaaggattacgccggtgtcttctccgacgcagggctgaccttcacgagcagcagtggccagcagaccgcccagagggcagaacttcagtgcccgcagccagccgcccgccgacgccgttccgtgcagctcacggagaagcgaatggacaaagtcggcaagtaccccaaggagctgcgcaagtgctgcgaggacggcatgcgggagaaccccatgaggttctcgtgccagcgccggacccgtttcatctccctgggcgaggcgtgcaagaaggtcttcctggactgctgcaactacatcacagagctgcggcggcagcacgcgcgggccagccacctgggcctggccaggagtaacctggatgaggacatcattgcagaagagaacatcgtttcccgaagtgagttcccagagagctggctgtggaacgttgaggacttgaaagagccaccgaaaaatggaatctctacgaagctcatgaatatatttttgaaagactccatcaccacgtgggagattctggctgtgagcatgtcggacaagaaagggatctgtgtggcagaccccttcgaggtcacagtaatgcaggacttcttcatcgacctgcggctaccctactctgttgttcgaaacgagcaggtggaaatccgagccgttctctacaattaccggcagaaccaagagctcaaggtgagggtggaactactccacaatccagccttctgcagcctggccaccaccaagaggcgtcaccagcagaccgtaaccatcccccccaagtcctcgttgtccgttccatatgtcatcgtgccgctaaagaccggcctgcaggaagtggaagtcaaggctgctgtctaccatcatttcatcagtgacggtgtcaggaagtccctgaaggtcgtgccggaaggaatcagaatgaacaaaactgtggctgttcgcaccctggatccagaacgcctgggccgtgaaggagtgcagaaagaggacatcccacctgcagacctcagtgaccaagtcccggacaccgagtctgagaccagaattctcctgcaagggaccccagtggcccagatgacagaggatgccgtcgacgcggaacggctgaagcacctcattgtgaccccctcgggctgcggggaacagaacatgatcggcatgacgcccacggtcatcgctgtgcattacctggatgaaacggagcagtgggagaagttcggcctagagaagcggcagggggccttggagctcatcaagaaggggtacacccagcagctggccttcagacaacccagctctgcctttgcggccttcgtgaaacgggcacccagcacctggctgaccgcctacgtggtcaaggtcttctctctggctgtcaacctcatcgccatcgactcccaagtcctctgcggggctgttaaatggctgatcctggagaagcagaagcccgacggggtcttccaggaggatgcgcccgtgatacaccaagaaatgattggtggattacggaacaacaacgagaaagacatggccctcacggcctttgttctcatctcgctgcaggaggctaaagatatttgcgaggagcaggtcaacagcctgccaggcagcatcactaaagcaggagacttccttgaagccaactacatgaacctacagagatcctacactgtggccattgctggctatgctctggcccagatgggcaggctgaaggggcctcttcttaacaaatttctgaccacagccaaagataagaaccgctgggaggaccctggtaagcagctctacaacgtggaggccacatcctatgccctcttggccctactgcagctaaaagactttgactttgtgcctcccgtcgtgcgttggctcaatgaacagagatactacggtggtggctatggctctacccaggccaccttcatggtgttccaagccttggctcaataccaaaaggacgcccctgaccaccaggaactgaaccttgatgtgtccctccaactgcccagccgcagctccaagatcacccaccgtatccactgggaatctgccagcctcctgcgatcagaagagaccaaggaaaatgagggtttcacagtcacagctgaaggaaaaggccaaggcaccttgtcggtggtgacaatgtaccatgctaaggccaaagatcaactcacctgtaataaattcgacctcaaggtcaccataaaaccagcaccggaaacagaaaagaggcctcaggatgccaagaacactatgatccttgagatctgtaccaggtaccggggagaccaggatgccactatgtctatattggacatatccatgatgactggctttgctccagacacagatgacctgaagcagctggccaatggtgttgacagatacatctccaagtatgagctggacaaagccttctccgataggaacaccctcatcatctacctggacaaggtctcacactctgaggatgactgtctagctttcaaagttcaccaatactttaatgtagagcttatccagcctggagcagtcaaggtctacgcctattacaacctggaggaaagctgtacccggttctaccatccggaaaaggaggatggaaagctgaacaagctctgccgtgatgaactgtgccgctgtgctgaggagaattgcttcatacaaaagtcggatgacaaggtcaccctggaagaacggctggacaaggcctgtgagccaggagtggactatgtgtacaagacccgactggtcaaggttcagctgtccaatgactttgacgagtacatcatggccattgagcagaccatcaagtcaggctcggatgaggtgcaggttggacagcagcgcacgttcatcagccccatcaagtgcagagaagccctgaagctggaggagaagaaacactacctcatgtggggtctctcctccgatttctggggagagaagcccaacctcagctacatcatcgggaaggacacttgggtggagcactggcccgaggaggacgaatgccaagacgaagagaaccagaaacaatgccaggacctcggcgccttcaccgagagcatggttgtctttgggtgccccaactga

SEQ ID NO: 634 - DNA, 4086 bp, Homo sapiens
  source 1..4086: mol_type = genomic DNA
atgggggatgatcaggaggatgattttcccaggcggctcagcgagagtatggaggacctcagcctggatttgggggcccttcagggcagcgagtatctgcaggacctgggccttggggccccttcccacagccagcctggggagaccccagacagccgccccaccggtgaagaaccaggaagagattctcttttctccagcttggcagggtcccaagacctgtcaaggcggcgcagctgggaaaggtcgcggagctgctcagagagctggcggaggctcagcctcgatgcctcagctgtggatgaggaaccctgtctcccccgaacactggccagccttgctttgaacctgccaggaggagggctgaagacctggactcaagggtgtctctctgggggcgggacccccgcagagagcccaggcaaggaatgtgacagccccaagaaaagagggaggtcaaggtccgttcctgtgtccttctatgagatccgctctccggaaatctctccgggtttggaagtgcccactccacctgttcaaggcctggaacctccagtgctggagtgcatggaaaaagaccatgtggaaccagatcacgtgctgattgtccagcaggtgcttcaagaacttcgacagtaccatggggcccggcagagggcttgcatgtcagccagccccggaggagcccactcgaacctgacctggtttgaattcctgtcggagagcgaggacggtgctggcaagaacgagaagagtgacaagagtaccagtgtgaagcgcaggctgagctgcctccgcagtcgagtgaccaggcagaaggagaaggggaagagcccagcacatctgaaggacaagggccaggatgcacgagagaggcgggagtgtgtcaatgggcaccagctgttgcaagggaccttctccggcccctccagctgccccctgtgtggcaaacctttcttgagctcagcctcgctcaaggagcacccccggggcaccctcctgtccgatggcagcccggccctgtccaggaatgtcggtatgacggtctctcagaaagggggtccccagccaacaccgagcccggctggccctgggacgcaactcggaccaatcacaggagagatggatgaagccgattctgcgtttttaaaatttaagcagacagctgatgactctctgtcccttacatctccaaacaccgagtccatttttgtagaagatccctacaccgcctcgctgaggagtgagattgagtcagacggccacgagtttgaagctgagtcctggagcctcgccgtggatgcagcctacgccaagaagcaaaagagggaggtggtgaaaagacaagatgtcctttatgagctgatgcagacagaggtgcaccacgtgcggacgctcaagatcatgctgaaggtgtactccagggccctgcaggaggagctgcagttcagcagcaaggccattggccgcctcttcccatgcgctgacgacctgctggagacgcacagccacttcctcgctcggctcaaggagcgccgccaggagtccctggaggagggcagtgaccggaattatgtcatccagaaaatcggcgacctcctggttcagcagttttcaggtgaaaatggggagagaatgaaagaaaagtacggtgtgttttgtagtggccacaatgaagctgttagtcattacaagttgctgcttcagcaaaacaagaaatttcaaaacttgatcaagaaaattggcaacttctccatcgtgcggcggcttggcgtgcaggagtgcattctcctggttacacaacgcataaccaaatacccagtgctggtggagcgcatcatccagaacacggaagctggcactgaggactatgaagacctgacccaggccttgaacctcatcaaagatatcatctcacaagtggacgccaaggtcagtgagtgtgagaagggccagcgcctcagggagatcgcagggaagatggacctgaagtcttccagcaaactcaagaacgggctcaccttccgcaaggaagacatgcttcagcggcagctccacctggagggcatgctatgctggaagaccacatcagggcgcttgaaagatatcctggctatcctgctgaccgacgtacttttgctgctacaagaaaaagatcagaaatacgtctttgcttctgtggactcaaagccacccgtcatctcgttacaaaagctcatcgtgagggaagtggccaacgaggagaaagcgatgtttctgatcagcgcctccttgcaagggccggagatgtatgaaatctacacgagctccaaagaggacaggaacgcctggatggcccacatccaaagggctgtggagagctgccctgacgaggaggaggggcccttcagcctgcccgaagaggaaaggaaggtggtcgaggcccgcgccacgagactccgggactttcaagagcggttgagcatgaaagaccagctgatcgcacagagcctcctagagaaacagcagatctacctggagatggccgagatgggcggcctcgaagacctgccccagccccgaggcctattccgtggaggggacccatccgagaccctgcagggggagctaattctcaagtcggccatgagcgagatcgagggcatccagagcctgatctgcaggcagctgggcagcgccaacggccaggcggaagacggaggcagctccacaggcccgcccaggagggctgagaccttcgcgggctacgactgcacaaacagccccaccaagaatggcagtttcaagaagaaagtcagcagcactgaccccaggccccgagactggcgaggccccccaaacagcccggacttgaagctcagtgacagtgacattcctgggagctctgaggaatcgccgcaggtggtggaggcgccaggcacggaatccgatccccgtctgcccaccgtcctggagtcggagcttgtccagcggatccagacactgtcccagctgctcctgaaccttcaggcggtaatcgcccaccaggacagctatgtggagacgcagcgggctgccatccaggagcgggagaagcagttccggctgcagtcgacgcgtgggaacctgctgctggagcaggagcggcaacgcaacttcgagaagcagcgggaggagcgcgcggccctggagaagctgcagagccagctgcggcacgagcagcagcgctgggagcgcgagcgccagtggcagcaccaggagctggagcgtgcgggcgcgcggctgcaggagcgcgagggcgaggcgcggcagctacgcgagcggctggagcaggagcgggccgagctggagcgccagcgccaggcctaccagcacgacctggagcggctgcgcgaggcccagcgtgccgtggagcgcgagcgggagcgcctggagctgctgcgccgcctcaagaagcagaacaccgcgccaggcgcgctgccgcccgacacactggccgaggcccagcccccaagccaccctcccagcttcaacggggaagggctggagggccctcgtgtgagcatgctgccatccggcgtggggccagagtacgcagagcgccccgaggtggctcgccgggacagcgcccccaccgagaaccggctggccaagagcgatgtgcccatccagctgctcagcgccaccaaccagttccagaggcaggcggccgtgcagcagcagatccccaccaagctggcggcctccaccaagggtggcaaggacaagggcggcaagagcaggggctctcagcgctgggagagctcagcgtccttcgacctgaagcagcagctgctgctcaacaagctcatggggaaagatgagagcacctcacggaaccgccgctcgctgagccctatcctgcccggcagacacagtcctgcgcccccaccagaccctggcttccccgccccgagcccaccgccagctgacagcccctccgagggcttctctctcaaggccgggggcacagccctcctgcccgggcccccagctccctcgccactgccggccacaccactcagcgccaaggaggacgccagcaaagaagacgtcatcttcttctaa

SEQ ID NO: 635 - DNA, 4128 bp, Homo sapiens
  source 1..4128: mol_type = genomic DNA
atggaggctccgctgcaaactggaatgatggggacatcgagtcacgggctggctacgaactcctcgggggcgaaggtggcggagagggatgggttccaggacgtcctggcgcccggggaaggctcggcgggacggatttgcggtgcgcagccagtgccgttcgtccctcaggtgcttggcgtgatgatcggggccggagtggcggtggtggtcacggccgtgctcatcctcctggtggtgcggaggctgcgagtgccaaaaaccccagccccggatggcccccggtatcggttccggaagagggacaaagtgctcttctatggccggaagattatgcggaaggtgtcacaatccacctcctccctcgtggatacctctgtctccgccacctcccggccacgcatgaggaagaaactgaagatgctcaacattgccaagaagatcctgcgcatccagaaagagacgcccacgctgcagcggaaggagcccccgcccgcagtgctagaagctgacctgaccgagggcgacctggctaactcccatctgccctctgaagtgctttatatgctcaagaacgtccgggtgctgggccacttcgagaagccactcttcctggagctctgccgccacatggtcttccagcggctgggccagggtgactacgtcttccggccgggccagccagatgccagcatctacgtggtgcaggacgggctgctggagctctgtctgccagggcctgacgggaaggagtgtgtggtgaaggaagtggttcctggggacagcgtcaacagccttctcagcatcctggatgtcatcaccggtcaccagcatccccagcggaccgtgtctgcccgggcggcccgggactccacggtgctgcgcctgccggtggaagcattctccgcggtcttcaccaagtacccggagagcttggtgcgggtcgtgcagatcatcatggtgcggctgcagcgagtcaccttcctggcactgcacaactacctgggtctgaccaatgagctcttcagccacgagatccagcccctgcgtctgttccccagccccggcctcccaactcgcaccagccctgtgcggggctccaagagaatggtcagcacctcagctacagacgagcccagggagaccccagggcggccacccgatcccaccggggccccgctgcctggacctacaggggaccctgtgaagcccacatccctggaaaccccctcggcccctctgctgagccgctgcgtctccatgccaggggacatctcaggcttgcagggtggcccccgctccgacttcgacatggcctatgagcgtggccggatctccgtgtccctgcaggaagaggcctccggggggtccctggcagcccccgctcggacccccactcaggagcctcgtgagcagccggcaggcgcctgtgaatacagctactgtgaggatgagtcggccactggtggctgccctttcgggccctaccagggccgccagaccagcagcatcttcgaggcagcaaagcaggagctggccaagctgatgcggattgaggacccctccctcctgaacagcagagtcttgctgcaccacgccaaagctggcaccatcattgcccgccagggagaccaggacgtgagcctgcacttcgtgctctggggctgcctgcacgtgtaccagcgcatgatcgacaaggcggaggacgtgtgcctgttcgtagcgcagcccggggaactggtggggcagctggcggtgctcactggcgaacctctcatcttcacactgcgagcccaacgcgactgcaccttcctgcggatctccaagtccgacttctatgagatcatgcgcgcacagcccagtgtggtgctgagtgcggcgcacacggtggcagccaggatgtcgcccttcgtgcgccagatggacttcgccatcgactggactgcagtggaggcgggacgcgcgctgtacaggcagggcgaccgctccgactgcacttacatcgtgctcaatgggcggctgcgtagcgtgatccagcgaggcagtggcaagaaggagctggtgggcgagtacggccgcggcgacctcatcggcgtggtggaggcactgacccggcagccgcgagccacgacggtgcacgcggtgcgcgacacggagctggccaagcttcccgagggcaccttgggtcacatcaaacgccggtacccgcaggtcgtgacccgccttatccacctactgagccagaaaattctagggaatttgcagcagctgcaaggacccttcccagcaggctctgggttgggtgtgcccccacactcggaactcaccaacccagccagcaacctggcaactgtggcaatcctgcctgtgtgtgctgaggtccccatggtggccttcacgctggagctgcagcacgccctgcaggccatcggtccgacgctactccttaacagtgacatcatccgggcacgcctgggggcctccgcactggatagcatccaagagttccggctgtcagggtggctggcccagcaggaggatgcacaccgtatcgtactctaccagacggacgcctcgctgacgccctggaccgtgcgctgcctgcgacaggccgactgcatcctcattgtgggcctgggggaccaggagcctaccctcggccagctggagcagatgctggagaacacggctgtgcgcgcccttaagcagctagtcctgctccaccgagaggagggcgcgggccccacgcgcaccgtggagtggctaaatatgcgcagctggtgctcggggcacctgcacctgcgctgtccgcgccgcctcttttcgcgccgcagccctgccaagctgcatgagctctacgagaaggttttctccaggcgcgcggaccggcacagcgacttctcccgcttggcgagggtgctcacggggaacaccattgcccttgtgctaggcgggggcggggccaggggctgctcgcacatcggagtactaaaggcattagaggaggcgggggtccccgtggacctggtgggcggcacgtccattggctctttcatcggagcgttgtacgcggaggagcgcagcgccagccgcacgaagcagcgggcccgggagtgggccaagagcatgacttcggtgctggaacctgtgttggacctcacgtacccagtcacctccatgttcactgggtctgcctttaaccgcagcatccatcgggtcttccaggataagcagattgaggacctgtggctgccttacttcaacgtgaccacagatatcaccgcctcagccatgcgagtccacaaagatggctccctgtggcggtacgtgcgcgccagcatgacgctgtcgggctacctgcccccgctgtgcgaccccaaggacgggcacctactcatggatggcggctacatcaacaatctgccagcggacatcgcccgcagcatgggtgccaaaacggtcatcgccattgacgtggggagccaggatgagacggacctcagcacctacggggacagcctgtccggctggtggctgctgtggaagcggctgaatccctgggctgacaaggtaaaggttccagacatggctgaaatccagtcccgcctggcctacgtgtcctgtgtgcggcagctagaggttgtcaagtccagctcctactgcgagtacctgcgcccgcccatcgactgcttcaagaccatggactttgggaagttcgaccagatctatgatgtgggctaccagtacgggaaggcggtgtttggaggctggagccgtggcaacgtcattgagaaaatgctcacagaccggcggtctacagaccttaatgagagccgccgtgcagacgtgcttgccttcccaagctctggcttcactgacttggcagagattgtgtcccggattgagccccccacgagctatgtctctgatggctgtgctgacggagaggagtcagattgtctgacagagtatgaggaggacgccggacccgactgctcgagggatgaaggggggtcccccgagggcgcaagccccagcactgcctccgagatggaggaggagaagtcgattctccggcaacgacgctgtctgccccaggagccgcccggctcagccacagatgcctga

SEQ ID NO: 636 - DNA, 708 bp, Homo sapiens
  source 1..708: mol_type = genomic DNA
atggcgagggaggagtgcaaggcgctgctggacgggctcaacaagacgactgcgtgctaccaccacctggtgctgaccgtcggtggctcggcggactcgcagaacctgcggcaggagctgcaaaagacgcgccagaaggcgcaggagctggcggtgtccacctgcgcccggctgactgctgtgctgcgcgaccggggcctggccgccgacgagcgcgccgagttcgagcggctctgggtggccttctcgggctgcctggacctgctggaagcggacatgcgacgcgcgctggagctgggcgccgcgttcccgctgcacgcgccgcggcggccgctggtgcgcacaggtgtggctggcgcctcctccggcgtggcggcgcgcgcgctgagcacccgcagcctgcggctcgaggcggagggcgacttcgacgtcgcggacctgcgggagctggagcgcgaggtccttcaggtgggcgagatgatcgacaacatggagatgaaggtcaacgtgccccgctggaccgtgcaagcccggcaggcggcgggcgccgagctcctgtccacggtcagcgccggcccctcctcggtcgtgtccttgcaggagcgcggggggggttgcgaccccaggaaggccctggccgccatccttttcggcgccgtgctgctggcggctgtggccctagccgtgtgcgtggcgaagctgagctga

SEQ ID NO: 637 - DNA, 540 bp, Homo sapiens
  source 1..540: mol_type = genomic DNA
atggtggtgggcgcgttccctatggcgaagctgctatacttgggcatccggcaggtcagcaagccgcttgccaaccgtattaaggaggccgcccgccgaagcgagttcttcaagacctatatctgcctcccgccggctcaactgtatcactgggtggagatgcggaccaagatgcgcatcatgggcttccggggcacggtcatcaagccgctgaacgaggaggcggcagctgagctgggcgcagagctgctgggcgaagccaccatcttcatcgtgggcggcggctgcctagtgctggagtactggcgccaccaggcgcagcagcgccacaaggaggaggagcagcgtgctgcctggaacgcgctgcgggacgaggtgggccacctggcgctggcgctggaagcgctgcaggcgcaggtgcaggcggcgccgccacagggcgccctggaggaactgcgcacagagctgcaagaggtgcgcgcccagctctgcaatcccggccggtccgcttcccacgcagtgcctgcgtccaagaaatag

SEQ ID NO: 638 - DNA, 1500 bp, Homo sapiens
  source 1..1500: mol_type = genomic DNA
atgtctctggcagatgagctcttagctgatctcgaagaggcagcagaagaggaggaaggaggaagctatggggaggaagaagaggagccagcgatcgaggatgtgcaggaggagacacagctggatctttccggggattcagtcaagaccatcgccaagctatgggatagtaagatgtttgctgagattatgatgaagattgaggagtatatcagcaagcaagccaaagcttcagaagtgatgggaccagtggaggccgcgcctgaataccgcgtcatcgtggatgccaacaacctgaccgtggagatcgaaaacgagctgaacatcatccataagttcatccgggataagtactcaaagagattccctgaactggagtccttggtccccaatgcactggattacatccgcacggtcaaggagctgggcaacagcctggacaagtgcaagaacaatgagaacctgcagcagatcctcaccaatgccaccatcatggtcgtcagcgtcaccgcctccaccacccaggggcagcagctgtcggaggaggagctggagcggctggaggaggcctgcgacatggcgctggagctgaacgcctccaagcaccgcatctacgagtatgtggagtcccggatgtccttcatcgcacccaacctgtccatcattatcggggcatccacggccgccaagatcatgggtgtggccggcggcctgaccaacctctccaagatgcccgcctgcaacatcatgctgctcggggcccagcgcaagacgctgtcgggcttctcgtctacctcagtgctgccccacaccggctacatctaccacagtgacatcgtgcagtccctgccaccggatctgcggcggaaagcggcccggctggtggccgccaagtgcacactggcagcccgtgtggacagtttccacgagagcacagaagggaaggtgggctacgaactgaaggatgagatcgagcgcaaattcgacaagtggcaggagccgccgcctgtgaagcaggtgaagccgctgcctgcgcccctggatggacagcggaagaagcgaggcggccgcaggtaccgcaagatgaaggagcggctggggctgacggagatccggaagcaggccaaccgtatgagcttcggagagatcgaggaggacgcctaccaggaggacctgggattcagcctgggccacctgggcaagtcgggcagtgggcgtgtgcggcagacacaggtaaacgaggccaccaaggccaggatctccaagacgctgcagcggaccctgcagaagcagagcgtcgtatatggcgggaagtccaccatccgcgaccgctcctcgggcacggcctccagcgtggccttcaccccactccagggcctggagattgtgaacccacaggcggcagagaagaaggtggctgaggccaaccagaagtatttctccagcatggctgagttcctcaaggtcaagggcgagaagagtggccttatgtccacctga

SEQ ID NO: 639 - DNA, 1158 bp, Homo sapiens
  source 1..1158: mol_type = genomic DNA
atggcggcattgagcggagtccgctggctgacccgagcgctggtctccgccgggaaccctggggcatggagaggtctgagtacctcggccgcggcgcacgctgcatcgcggagccaggccgaggacgtgagggtggagggctcctttcccgtgaccatgcttccgggagacggtgtggggcctgagctgatgcacgccgtcaaggaggtgttcaaggctgccgctgtcccagtggagttccaggagcaccacctgagtgaggtgcagaatatggcatctgaggagaagctggagcaggtgctgagttccatgaaggagaacaaagtggccatcattggaaagattcataccccgatggagtataagggggagctagcctcctatgatatgcggctgaggcgtaagttggacttatttgccaacgtagtccatgtgaagtcacttcctgggtatatgactcggcacaacaatctagacctggtgatcattcgagagcagacagaaggggagtacagctctctggaacatgagagtgcaaggggtgtgattgagtgtttgaagattgtcacacgagccaagtctcagcggattgcaaagttcgcctttgactatgccaccaagaaggggcggggcaaggtcactgctgtccacaaggccaacatcatgaaacttggggatgggttgttcctgcagtgctgtgaggaagttgctgaactgtaccccaaaatcaaatttgagacaatgatcatagacaactgctgcatgcagctggtgcagaatccttaccagtttgatgtgcttgtgatgcccaatctctatgggaacattattgacaatctggctgctggcctggttgggggagctggtgtggtccctggtgagagctatagtgcagaatacgcagtctttgagacgggtgcccggcacccatttgcccaggcagtgggcaggaatatagccaatcccacggccatgctgctgtcggcttccaacatgctgcggcatcttaatcttgagtatcactccagcatgatcgcagatgcggtgaagaaggtgatcaaagttggcaaggtgcggactcgagacatgggcggctacagcaccacaaccgacttcatcaagtctgtcatcggtcacctgcagactaaagggagctag

SEQ ID NO: 640 - DNA, 1713 bp, Homo sapiens
  source 1..1713: mol_type = genomic DNA
atgaggaggctcgggcccttccacccacgcgtccattgggcggcgccgccatcactctcttctgggctacaccgccttctcttcctccgcggaacccggatcccctcctccaccaccctctccccgccccgtcacgatagcctctcattggacggaggcacggtcaatcctcctcgagttagggagccgactggacgcgaggcctttgggccgtccccagcctcgtcggattggcttcctgcgcgttggcgcaacggaagaggcggccggccgagggcgcgcctctgctctggctggactgccgcggaggaggcgagaaggaatccgacgctggggggcttgctcgggcggcagcgactgctgctgcggatgggagggggccggctcggcgcgcccatggagcgccacggcagggcttccgccacctccgtctcgtcggctggggagcaggcggccggggaccccgaagggcggcggcaggagccactgcggcgccgggcgagcagcgcgtcggtgcccgcggtcggggcctcggctgagggcacgaggcgggatcgactgggctcttacagcggccccacctcggtctcccgccagcgcgtcgaaagcctgaggaaaaagcggccgctttttccatggtttggactggatatcggtggaactctggtcaagctggtatattttgaacccaaagacatcactgctgaagaagaagaggaagaagtggaaagtcttaaaagcattcggaagtacctgacctccaatgtggcttatgggtctacaggcattcgggacgtgcacctcgagctgaaggacctgactctgtgtggacgcaaaggcaatctgcactttatacgctttcccactcatgacatgcctgcttttattcaaatgggcagagataaaaacttctcgagtctccacactgtcttttgtgccactggaggtggagcgtacaaatttgagcaggattttctcacaataggtgatcttcagctttgcaaactggatgaactagattgcttgatcaaaggaattttatacattgactcagtcggattcaatggacggtcacagtgctattactttgaaaaccctgctgattctgaaaagtgtcagaagttaccatttgatttgaaaaatccgtatcctctgcttctggtgaacattggctcaggggttagcatcttagcagtatattccaaagataattacaaacgggtcacaggtactagtcttggaggaggaactttttttggtctctgctgtcttcttactggctgtaccacttttgaagaagctcttgaaatggcatctcgtggagatagcaccaaagtggataaactagtacgagatatttatggaggggactatgagaggtttggactgccaggctgggctgtggcttcaagctttggaaacatgatgagcaaggagaagcgagaggctgtcagtaaagaggacctggccagagcgactttgatcaccatcaccaacaacattggctcaatagcaagaatgtgtgcccttaatgaaaacattaaccaggtggtatttgttggaaatttcttgagaattaatacgatcgccatgcggcttttggcatatgctttggattattggtccaaggggcagttgaaagcacttttttcggaacacgagggttattttggagctgttggagcactccttgagctgttgaagatcccgtga

SEQ ID NO: 641 - DNA, 3657 bp, Homo sapiens
  source 1..3657: mol_type = genomic DNA
atgcgttccccacggacgcgcggccggtccgggcgccccctaagcctcctgctcgccctgctctgtgccctgcgagccaaggtgtgtggggcctcgggtcagttcgagttggagatcctgtccatgcagaacgtgaacggggagctgcagaacgggaactgctgcggcggcgcccggaacccgggagaccgcaagtgcacccgcgacgagtgtgacacatacttcaaagtgtgcctcaaggagtatcagtcccgcgtcacggccggggggccctgcagcttcggctcagggtccacgcctgtcatcgggggcaacaccttcaacctcaaggccagccgcggcaacgaccgcaaccgcatcgtgctgcctttcagtttcgcctggccgaggtcctatacgttgcttgtggaggcgtgggattccagtaatgacaccgttcaacctgacagtattattgaaaaggcttctcactcgggcatgatcaaccccagccggcagtggcagacgctgaagcagaacacgggcgttgcccactttgagtatcagatccgcgtgacctgtgatgactactactatggctttggctgcaataagttctgccgccccagagatgacttctttggacactatgcctgtgaccagaatggcaacaaaacttgcatggaaggctggatgggccccgaatgtaacagagctatttgccgacaaggctgcagtcctaagcatgggtcttgcaaactcccaggtgactgcaggtgccagtacggctggcaaggcctgtactgtgataagtgcatcccacacccgggatgcgtccacggcatctgtaatgagccctggcagtgcctctgtgagaccaactggggcggccagctctgtgacaaagatctcaattactgtgggactcatcagccgtgtctcaacgggggaacttgtagcaacacaggccctgacaaatatcagtgttcctgccctgaggggtattcaggacccaactgtgaaattgctgagcacgcctgcctctctgatccctgtcacaacagaggcagctgtaaggagacctccctgggctttgagtgtgagtgttccccaggctggaccggccccacatgctctacaaacattgatgactgttctcctaataactgttcccacgggggcacctgccaggacctggttaacggatttaagtgtgtgtgccccccacagtggactgggaaaacgtgccagttagatgcaaatgaatgtgaggccaaaccttgtgtaaacgccaaatcctgtaagaatctcattgccagctactactgcgactgtcttcccggctggatgggtcagaattgtgacataaatattaatgactgccttggccagtgtcagaatgacgcctcctgtcgggatttggttaatggttatcgctgtatctgtccacctggctatgcaggcgatcactgtgagagagacatcgatgaatgtgccagcaacccctgtttgaatgggggtcactgtcagaatgaaatcaacagattccagtgtctgtgtcccactggtttctctggaaacctctgtcagctggacatcgattattgtgagcctaatccctgccagaacggtgcccagtgctacaaccgtgccagtgactatttctgcaagtgccccgaggactatgagggcaagaactgctcacacctgaaagaccactgccgcacgaccccctgtgaagtgattgacagctgcacagtggccatggcttccaacgacacacctgaaggggtgcggtatatttcctccaacgtctgtggtcctcacgggaagtgcaagagtcagtcgggaggcaaattcacctgtgactgtaacaaaggcttcacgggaacatactgccatgaaaatattaatgactgtgagagcaacccttgtagaaacggtggcacttgcatcgatggtgtcaactcctacaagtgcatctgtagtgacggctgggagggggcctactgtgaaaccaatattaatgactgcagccagaacccctgccacaatgggggcacgtgtcgcgacctggtcaatgacttctactgtgactgtaaaaatgggtggaaaggaaagacctgccactcacgtgacagtcagtgtgatgaggccacgtgcaacaacggtggcacctgctatgatgagggggatgcttttaagtgcatgtgtcctggcggctgggaaggaacaacctgtaacatagcccgaaacagtagctgcctgcccaacccctgccataatgggggcacatgtgtggtcaacggcgagtcctttacgtgcgtctgcaaggaaggctgggaggggcccatctgtgctcagaataccaatgactgcagccctcatccctgttacaacagcggcacctgtgtggatggagacaactggtaccggtgcgaatgtgccccgggttttgctgggcccgactgcagaataaacatcaatgaatgccagtcttcaccttgtgcctttggagcgacctgtgtggatgagatcaatggctaccggtgtgtctgccctccagggcacagtggtgccaagtgccaggaagtttcagggagaccttgcatcaccatggggagtgtgataccagatggggccaaatgggatgatgactgtaatacctgccagtgcctgaatggacggatcgcctgctcaaaggtctggtgtggccctcgaccttgcctgctccacaaagggcacagcgagtgccccagcgggcagagctgcatccccatcctggacgaccagtgcttcgtccacccctgcactggtgtgggcgagtgtcggtcttccagtctccagccggtgaagacaaagtgcacctctgactcctattaccaggataactgtgcgaacatcacatttacctttaacaaggagatgatgtcaccaggtcttactacggagcacatttgcagtgaattgaggaatttgaatattttgaagaatgtttccgctgaatattcaatctacatcgcttgcgagccttccccttcagcgaacaatgaaatacatgtggccatttctgctgaagatatacgggatgatgggaacccgatcaaggaaatcactgacaaaataatcgatcttgttagtaaacgtgatggaaacagctcgctgattgctgccgttgcagaagtaagagttcagaggcggcctctgaagaacagaacagatttccttgttcccttgctgagctctgtcttaactgtggcttggatctgttgcttggtgacggccttctactggtgcctgcggaagcggcggaagccgggcagccacacacactcagcctctgaggacaacaccaccaacaacgtgcgggagcagctgaaccagatcaaaaaccccattgagaaacatggggccaacacggtccccatcaaggattatgagaacaagaactccaaaatgtctaaaataaggacacacaattctgaagtagaagaggacgacatggacaaacaccagcagaaagcccggtttgccaagcagccggcgtacacgctggtagacagagaagagaagccccccaacggcacgccgacaaaacacccaaactggacaaacaaacaggacaacagagacttggaaagtgcccagagcttaaaccgaatggagtacatcgtatag

SEQ ID NO: 642 - DNA, 1713 bp, Homo sapiens
  source 1..1713: mol_type = genomic DNA
atgtctcgtttggaagctaagaagccatcattgtgtaagagtgaaccactgacaactgagagagtcaggaccacactttctgtcttgaaaagaattgtaacatcatgctatggcccctcaggtaggctgaagcagctgcacaatggctttggaggttacgtgtgtacaacctcacagtcctcagctctgctcagtcaccttttggtcacacatcccattttaaagatcctgacagcctccatacagaatcatgtgtcaagcttcagtgattgtggcttattcacagctattctttgctgcaacctgattgaaaatgttcagagattaggcttgacacccaccactgtcattagattaaataaacatcttttgagtctttgcatcagttatctcaagtctgagacctgtggttgtcgaatcccagtggactttagtagtactcagatcctcctttgtttggtgcgtagtatattaacaagtaaacctgcctgtatgctcaccagaaaggaaacagagcatgtcagtgctttgatcctgagagcctttttgcttacaattccagaaaatgctgaaggccacatcattttaggaaagagtttaattgtacctttaaaaggtcaaagagttatagattccactgtattacctgggatactcattgaaatgtcagaagttcaattaatgaggctattacctatcaaaaaatcaactgccctcaaggtggcactcttttgtacaactttatccggagacacttctgacactggagaaggaactgtggtggtcagttatggggtttctcttgaaaatgcagtcttggaccagctgcttaacctaggaaggcagctaatcagtgaccacgtagatcttgtcctgtgccaaaaagttatacatccatctttgaagcagtttctcaatatgcatcgtattattgccatagacagaattggagtgactctgatggaacccctgactaaaatgacaggaacacagcctattggatccctaggctcaatatgtcctaatagttatggaagtgtgaaagatgtgtgcactgcaaaatttggctccaaacatttttttcatcttattcctaatgaagcaacaatctgcagcttgcttctctgcaacagaaatgacactgcctgggatgagctgaagctcacgtgtcagacggcactgcatgtcctgcagttaacactcaaggaaccatgggctttgttgggaggtggctgtactgaaactcatttggctgcatatatcagacacaagactcacaacgacccagaaagcattctcaaagatgatgaatgtactcaaacagaacttcaattaattgctgaagcattttgcagtgccctagaatctgttgttggctctttagaacatgatggaggtgaaattctcactgacatgaagtatggacacctttggtcagttcaggcagattctccctgtgttgctaactggccagatttgctttcacagtgtggctgtggattatacaatagccaggaagaactcaactggtctttcttaagaagcacacgtcgtccatttgtgccacaaagctgccttccacatgaagctgtgggctcagccagcaacctgaccttggactgtttgactgcaaagcttagtggcctacaggtggctgtagagacagccaatttgattttggatctttcatatgttattgaagataaaaactaa

SEQ ID NO: 643 - DNA, 2022 bp, Homo sapiens
  source 1..2022: mol_type = genomic DNA
atgagccggaccctcgcatcggccgtgcccctgtcgagtcccgactactacgagaggctgggccaactccagcacgggctgcgggacagtgaaaagaagagattggacctggaaaagaaactttatgaatataatcagtctgatacatgcagagttaagctgaaatatgtaaaactaaagaattatctgaaggaaatatgtgaatctgaaaagaaggctcatactcgaaaccaagaatatttaaagcgatttgagcgtgtccaagctcatgttgtacacttcaccacaaatacagagaagcttcaaaaactgaagctcgaatatgagactcaaattaagaagatgctatgctcaaaagatagcctgggactaaaagaggaactgacagatgaagacagagaaaaggttgcagtgcacgaggggattaactcaggaacagccatgtcaagaggattgtatcaaccagcaacaatctttatgggccgccaaatgtcagccatcttaagcatgagagatttcagtacagagcacaaatctccccagcccacaaagaacttttcaattcctgacccacattcacaccgacagacagcccagagcagtaatgtgacagacagctgtgtagtacaaactagtaatgacacacagtgcttaaataagtctgacaacatagatggaaaggcatctcttcagattggtgagaaaatgccagtcacagccagtgtattgtctgaggaggaacaaactcattgcttggagataggaagtaacacacgtcatggcaagagtaatttatctgaaggcaaaaagtctgctgaactcaattccccgttacgggaaagattaagtccagagaacagaaccactgatttaaagtgtgacagttccagcggatcagagggagaaatactgacacgggaacatattgaagttgaggaaaaaagagccagcccgccagtctctccgataccagtttcagaatactgtgaatctgaaaataagtggtctcaagagaagcattctccttgggaaggtgtttcagatcatcttgctcacagggaaccaaagtcacaaaagcccttcagaaaaatgcaggaagaggaggaggaaagttggagcaccagcagtgaccttaccatttcaataagtgaagatgatctgattttagagagcccagaaccacagccaaatccaggtggcaagatggagggagaagatggaatagaggccttaaaattaatccatgctgagcaagaaagagttgccctatccactgaaaaaaattgtattttgcaaaccctaagctctcctgattcagaaaaggaatcctccactaacgcaccaacaagagaacctggacaaacaccagactcagacgtaccgagggcacaggtgggtcagcatgttgccaccttgaaagaacatgataattctgtcaaagaagaggcaacagcattattgagaaaagcccttacagaagagtgtggccgtaggtcagctattcacagtagtgaatcatcttgcagcttgccatctattctgaatgacaatagtggaataaaggaagccaaacctgctgtatggctcaacagtgttcctacaagggaacaagaagtttcaagtggctgtggagacaagagcaagaaagaaaatgtggctgcagatatcccaatcacagaaacagaagcctatcagttgctgaagaaggccacccttcaggataatacaaatcaaactgaaaacaggtttcaaaagacagatgcttctgtgtcacacttgtcaggtttgaatattggcagcggtgcattcgagacaaagacagctaacaaaattgcttcggaagctagtttttcatctagtgaaggaagtcctttgtcaaggcatgaaaacaaaaagaaacccgtgatcaatttaaaatctaatgccctctgggatgagtctgatgacagtaactcagaaattgaggctgctttacgccccagaaaccataacaccgatgattctgatgatttttatgactaa

SEQ ID NO: 644 - DNA, 1197 bp, Homo sapiens
  source 1..1197: mol_type = genomic DNA
atgaggaagcggaccgagcccgtcgccttggagcatgagcgctgcgccgccgcgggctcgtcctcctccggctcggccgccgcggcgctggacgccgactgccgcctgaagcagaacctacgcctgacgggcccggcggcggctgagccgcgctgcgcagccgacgcgggaatgaagcgggcgctgggcaggcgaaagggcgtgtggttgcgcctgaggaagatacttttctgtgttttggggttgtacattgccattccatttctcatcaaactatgtcctggaatacaggccaaactgattttcttgaatttcgtaagagttccctatttcattgatttgaaaaaaccacaggatcaaggtttgaatcacacgtgtaactactacctgcagccagaggaagacgtgaccattggagtctggcacaccgtccctgcagtctggtggaagaacgcccaaggcaaagaccagatgtggtatgaggatgccttggcttccagccaccctatcattctgtacctgcatgggaacgcaggtaccagaggaggcgaccaccgcgtggagctttacaaggtgctgagttcccttggttaccatgtggtcacctttgactacagaggttggggtgactcagtgggaacgccatctgagcggggcatgacctatgacgcactccacgtttttgactggatcaaagcaagaagtggtgacaaccccgtgtacatctggggccactctctgggcactggcgtggcgacaaatctggtgcggcgcctctgtgagcgagagacgcctccagatgcccttatattggaatctccattcactaatatccgcgaagaagctaagagccatccattttcagtgatatatcgatacttccctgggtttgactggttcttccttgatcctattacaagtagtggaattaaatttgcaaatgatgaaaacgtgaagcacatctcctgtcccctgctcatcctgcacgctgaggacgacccggtggtgcccttccagcttggcagaaagctctatagcatcgccgcaccagctcgaagcttccgagatttcaaagttcagtttgtgccctttcattcagaccttggctacaggcacaaatacatttacaagagccctgagctgccacggatactgagggaattcctggggaagtcggagcctgagcaccagcactga

SEQ ID NO: 645 - DNA, 2244 bp, Homo sapiens
  source 1..2244: mol_type = genomic DNA
atgtcaaagttgaaaagctcagagtcagtcagggtggtggttcgctgtcggcccatgaatggcaaggaaaaggctgcttcgtatgacaaagtggtggatgtggatgttaagctggggcaggtgtctgtgaagaaccccaaagggacggcccatgaaatgcccaagaccttcacctttgatgccgtctatgactggaatgccaagcagtttgaactgtacgatgagacgttccgaccacttgttgactctgtcctgcaaggtttcaatggaaccatttttgcctatggacaaactgggacaggaaaaacctacaccatggaaggaatccgtggtgaccctgaaaaaagaggagtcattcctaactcatttgaccatatcttcacccacatctctcgatcccagaatcaacaatacctggtcagggcttcttacttagagatctaccaggaggagatccgagatttgctctcaaaggatcagaccaaaaggcttgagctcaaagagaggcctgacacaggagtgtatgtgaaagacctgtcttcctttgtcaccaagagtgtgaaggagatagagcatgtgatgaatgtggggaaccagaaccgttctgtcggtgctaccaacatgaacgagcacagctcgcgttctcatgcaattttcgttatcactattgagtgcagcgaggtgggcctcgatggtgaaaaccacatccgtgtaggaaaattgaaccttgtagatcttgctggcagcgaacggcaagccaagaccggcgcacaaggggagagattaaaagaagctaccaagatcaacctctccctttccgctttgggtaatgtcatctctgctctagtggacggcaaaagcactcacattccatatcgggactcaaagcttaccaggctcctccaagattcccttggtggcaatgccaagactgtgatggtggccaacgtggggcctgcctcttacaacgtagaagagactctgaccactctgcgatatgccaaccgtgccaaaaacattaagaacaaaccaagggtcaatgaggaccccaaggatgccctccttcgagaattccaggaagagattgctcggctcaaggcccagctggaaaaacggtccattggtaggaggaagaggcgagagaagcggagggaaggtggtggcagtggtgggggtggggaagaggaggaggaggagggagaagagggtgaggaggaaggggatgataaggatgattactggcgggaacagcaagaaaaactggagattgagaagcgggccattgtagaggatcacagcttggttgcagaggagaagatgaggctgctgaaggagaaagagaaaaagatggaggacctgcggcgggagaaggatgctgccgagatgctgggcgccaagatcaaggccatggagagtaagttgcttgttggaggaaaaaatatagtagatcatacgaatgaacagcagaaaatcctggagcagaaacgacaggaaattgcagagcagaaacgtcgagaaagagaaatccagcaacagatggaaagtcgagatgaggagaccttggaacttaaagagacatacagctcattgcagcaagaggtggacatcaagaccaaaaaactcaaaaagctcttctccaagcttcaggcagtgaaggctgagatccatgacctccaagaagaacacatcaaggagcgccaagagctagagcagactcagaatgagctcaccagggagctgaaactcaagcatcttattatagaaaactttatccctctggaagaaaaaagtaaaattatgaatagagccttctttgatgaagaggaagatcattggaaactacatcctataaccagactggagaaccagcagatgatgaagcggccagtctcagccgtgggatataagagaccattgagccagcacgcaagaatgtccatgatgattcgtccagaggcccgatatagggcagaaaacattgtgctgttagagctggacatgcccagccggaccaccagagactatgagggtccagccattgcccccaaggtccaggctgcattggatgcggctctgcaggatgaagatgagatacaggtggatgcatcatcatttgaaagcactgcaaataagaaatccaaggccaggcctaaaagtggaaggaagtcgggatcctcctcctcttcctcaggaacccctgcatctcagctttatccacagtctcgggggctggttccaaagtaa

SEQ ID NO: 646 - DNA, 7329 bp, Homo sapiens
  source 1..7329: mol_type = genomic DNA
atggagacaagaagccctgggttgaacaacatgaagccccagtcactgcagctggtactggaagagcaggtgctggcactacagcagcagatggcagagaatcaggcagcctcctggcggaagctgaagaactcccaggaggcccagcagagacaagcaacccttgtgaggaagctgcaggccaaggtgctgcagtaccgaagctggtgccaagagctggagaagcggctagaagccactggaggaccaatcccccagaggtgggaaaatgtggaggagccaaacctggatgagctgctggtccgattggaggaggagcaacagaggtgtgagagtctagcagaggtgaacacccagcttcgactgcacatggaaaaagctgacgtggtgaataaagcccttagggaagatgtggaaaaactgacagtggactggagccgggcccgggatgagctaatgaggaaggagagccagtggcagatggagcaggagttcttcaagggctacctgaaaggggagcacggtcgccttctcagtctatggcgggaggttgtgacattccgacgccacttcctggaaatgaagtcagctactgacagagatctgatggagctaaaagctgagcatgtgaggctttcagggtctctgttgacctgttgtctgcgcttgactgtgggagcacagtctcgggaacccaacggatctggaagaatggatgggcgggagccggcccagctgctgctgctactagccaagacccaggagctggagaaggaagcccatgaaaggagccaggagttaatacagctgaagagtcaaggggatctggagaaggctgaacttcaggaccgggtgaccgagctctctgctctgttgacccagtctcagaagcaaaatgaagattatgaaaagatgataaaggctctgagagagacagtggagatcctggagacaaatcacacagaattaatggaacatgaagcatctcttagtaggaatgcgcaagaggagaagttgtctttacagcaggtgatcaaggatataacccaggtcatggtggaagaaggggacaatatagcccaaggctctggtcatgagaactctttggaattggactctagtatcttctcccagtttgattaccaggatgcagacaaggctcttactctggtgcgttcagtgctgactcggagacgccaggctgtgcaggacctaaggcagcagcttgcaggctgtcaagaggctgtgaacttgttgcaacagcagcatgatcagtgggaggaagagggcaaagccttgagacagcggctgcagaagctcactggggagcgggacactctggcagggcagactgtggacctccagggagaggtggactctctcagcaaggagcgagagctgctgcagaaggccagggaagagctgcggcagcagctggaggtgctagagcaggaggcatggcgcctgcgaagggtaaatgtggagcttcagctgcagggggactctgcccagggccagaaggaggaacagcaggaggagctgcacctggctgtccgggagagggagcgtcttcaggagatgctgatgggcctggaagccaaacagtcagaatcactcagtgaactgatcactcttcgggaagccctggagtcaagtcacctggaaggggagttactgaggcaagagcaaacggaagtgaccgcagcgctggctagggcagagcagtcaattgcagagctgtcgagttctgaaaacaccctgaagacagaagtagctgatcttcgggctgcagctgtcaagctcagtgccttaaatgaggctttggcgttagataaagttgggctgaaccagcagcttctccagttagaggaggagaaccagtctgtgtgcagcagaatggaggccgcagagcaggcgagaaatgctttgcaggtcgacctggcggaggcagagaagaggagggaagccctgtgggaaaagaacactcacctggaggctcagctgcagaaagctgaggaggctggggctgagctgcaggcagatctcagggacatccaagaagagaaggaagaaattcaaaagaaactaagtgagtcacgtcaccagcaggaggcagccacgactcagctggagcagctacatcaggaggcaaagcgacaggaagaagtgcttgccagggcagtccaggagaaggaggccctagtacgagagaaagcggctctagaggtgcggctgcaggccgtggagcgtgaccggcaggacctcgctgaacaactacaggggctcagctcagccaaggagctactggagagcagtctgtttgaagcccaacaacaaaattctgtgatagaggtcaccaaggggcagctggaggtccagattcaaactgtcactcaagccaaggaagtaatccaaggggaagtgaggtgcctgaagctggaactggacactgaacggagtcaggcagagcaggagcgggatgctgcagccagacagctggcccaggctgagcaagaagggaagactgccttggagcagcagaaggcagcccatgagaaagaggtgaaccagctccgggagaaatgggagaaggagcgctcctggcaccagcaggagctggcaaaggctctggagagcttagaaagggaaaaaatggagctggaaatgaggctaaaggagcagcagacagaaatggaggccatccaggcccagagggaagaagaacggacccaggcagagagtgccctatgccagatgcagctggaaacagagaaggagagagtatccctcctggagacactgctgcagacgcagaaggagctagcagatgccagccaacaactggaacgactgaggcaggacatgaaagtccagaaattaaaggagcaggagaccactgggatactacagacccagctccaggaggctcaacgggagctgaaggaggcagcccggcagcacagagatgaccttgctgccctccaagaagagagcagctccctgctgcaggataagatggacctgcagaagcaggtggaggacttgaagtctcagctggtggcccaggatgactcccagaggctggtggagcaggaggttcaggagaagctgagagagacccaggagtataaccgaattcagaaggagctggagagagagaaagccagcctgactctctcactgatggaaaaggaacagagactccttgttttacaagaagctgactctattcgacaacaagagctgagtgccctgcgccaggacatgcaggaggcccagggagaacagaaagagctcagtgctcagatggaattactaaggcaagaggtgaaggaaaaggaggctgactttctggcccaggaagcacagctgctggaggagctggaggcgtctcatatcacggagcagcagctgcgagcctccttgtgggcccaggaagccaaggcagcccaactacagctgcgactgcgcagcacagagagccagctagaagcgctggccgcagagcagcagcccgggaaccaggcccaggcccaggcccagctggccagcctctactctgccctgcagcaggccctggggtctgtttgtgagagcaggcctgagctgagtggtgggggagactctgctccttccgtctggggccttgagccagaccagaatggagctaggagcctctttaagagagggcccctgctgactgctctctccgctgaggcagtagcatctgccctccacaagcttcatcaagacctgtggaagactcaacagacccgggatgttctgagggatcaggtccagaaactggaagagcgtctaactgatactgaggctgagaagagccaggtccacacagagttgcaggatctgcagagacagctctcccagaatcaggaagagaaatctaagtgggaaggaaagcagaactccctagaatctgagctgatggaactacatgaaactatggcatccttacagagtcgcctgcggagagcagagctacagcgaatggaagcccagggtgagcgagagttacttcaggcagccaaggagaacctgacagcccaggtggaacacctgcaagcagctgtcgtagaagccagggctcaggcaagtgctgctggcatcctggaagaagacctgagaacggctcgctcagcactgaagctgaaaaatgaggaagtagagagtgagcgtgagagagcccaggctctgcaagagcagggcgaactgaaggtggcccaagggaaggctctgcaagagaatttggccctcctgacccagaccctagctgaaagagaagaggaggtggagactctgcggggacaaatccaggaactggagaagcaacgggaaatgcagaaggctgctttggaattgctgtctctggacctgaagaagaggaaccaagaggtagatctgcagcaagaacagattcaggagctagagaagtgtaggtctgttttagagcatctgcccatggccgtccaggagcgagagcagaagctgactgtgcagagggagcagatcagagagctcgagaaggatcgggagactcagaggaacgtcttggagcatcagcttctagaacttgagaagaaagaccaaatgattgagtcccagagaggacaggttcaggacctgaaaaagcagttggttactctggaatgcctggccctggaactggaggaaaaccatcacaagatggagtgccagcaaaaactgatcaaggagctggagggccagagggaaacccagagagtggctttgacccaccttacgctggacctagaagaaaggagccaggagctgcaggcacaaagcagccagatccatgacctggagagccacagcaccgttctggcaagagagctgcaggagagggaccaggaggtgaagtctcagcgagaacagatcgaggagctgcagaggcagaaagagcatctgactcaggatctcgagaggagagaccaggagctgatgctgcagaaggagaggattcaggttctcgaggatcagaggacccggcagaccaagatcctggaggaggacctggaacagatcaagctgtccttgagagagcgaggccgggagctgaccactcagaggcagctgatgcaggaacgggcagaggaagggaagggcccaagtaaagcacagcgcgggagcctagagcacatgaagctgatcctgcgtgataaggagaaggaggtggaatgtcagcaggagcatatccatgaactccaggagctcaaagaccagctggagcagcagctccagggcctgcacaggaaggtaggtgagaccagcctcctcctgtcccagcgagagcaggaaatagtggtcctgcagcagcaactgcaggaagccagggaacaaggggagctgaaggagcagtcacttcagagtcaactggatgaggcccagagagccctagcccagagggaccaggaactggaggctctgcagcaagaacagcagcaggcccagggacaggaggagagggtgaaggaaaaggcagacgccctccagggagctctggagcaagcccatatgacactgaaggagcgtcatggagagcttcaggaccacaaggaacaggcacgaaggctggaggaagagctggcagtggagggacggcgggtccaggccctggaggaggtgctgggagacctaagggctgagtctcgggaacaggagaaagctctgttggccctccagcagcagtgtgctgagcaggcacaggagcatgaggtggagaccagggccctgcaggacagctggctgcaggcccaggcagtgctcaaggaacgggaccaggagctggaagctctgcgggcagaaagtcagtcctcccggcatcaggaggaggctgcccgggcccgggctgaggctctgcaggaggcccttggcaaggctcatgctgccctgcaggggaaagagcagcatctcctcgagcaggcagaattgagccgcagtctggaggccagcactgcaaccctgcaagcctccctggatgcctgccaggcacacagtcggcagctggaggaggctctgaggatacaagaaggtgagatccaggaccaggatctccgataccaggaggatgtgcagcagctgcagcaggcacttgcccagagggatgaagagctgagacatcagcaggaacgggagcagctgctggagaagtctctggcccagagggtccaagagaatatgatccaagagaagcagaatctggggcaagagagagaagaggaggagataaggggccttcatcagagtgtaagggagctacagctgactctagcccaaaaggaacaggagattctggagctgagggagacccagcaaaggaacaacctggaagccttaccccacagccacaaaacctccccaatggaggaacaatctctaaaacttgattctttagagcccaggctgcagcgggagctggagcggctacaggcagccctgagacagacagaagccagggagattgagtggagggagaaggcccaggacttggcactctccctagcgcagaccaaggccagtgtcagcagtctgcaggaggtagccatgttcctacaagcctctgtcctggagcgggactcagaacagcaaaggctgcaggatgaactggagctcaccagacgggctctggagaaggagcggctacacagcccaggtgcaaccagcacagcagaactggggtccagaggggagcagggtgtgcagctgggagaggtctcaggagtggaggctgagcctagtcctgatggaatggagaagcagtcatggagacaaaggcttgaacacctgcagcaagcagtggcccggctggagattgacaggagcaggctgcagcgccacaatgtccagctgcggagtaccttggagcaggtggagcgagaacggaggaagctgaagagggaggccatgcgtgcggcccaggcagggtccctagagatcagcaaggccacggcttcttcacccacacagcaggatgggagaggacagaagaactcagatgccaagtgtgtggctgaactgcagaaagaggtggtcctgctgcaagctcagctgactttggagcggaagcagaagcaggactacatcacccgctcagcacagaccagccgtgagctagcaggcctgcaccacagcctctcacactcacttcttgccgtggcccaggcccctgaggccactgtcctggaggcagagacccgcaggctggatgagtccctgactcaaagtctgacatccccagggccagtcctgctacaccccagccccagcactacccaagccgcctccaggtag

SEQ ID NO: 647 - DNA, 2826 bp, Homo sapiens
  source 1..2826: mol_type = genomic DNA
atgaacaagaagaagaaaccgttcctagggatgcccgcgcccctcggctacgtgccggggctgggccggggcgccactggcttcaccacgcggtcagacattgggcccgcccgtgatgcaaatgaccctgtggatgatcgccatgcacccccaggcaagagaaccgttggggaccagatgaagaaaaatcaggctgctgacgatgacgacgaggatctaaatgacaccaattacgatgagtttaatggctatgctgggagcctcttctcaagtggaccctacgagaaagatgatgaggaagcagatgctatctatgcagccctggataaaaggatggatgaaagaagaaaagaaagacgggagcaaagggagaaagaagaaatagagaaatatcgtatggaacgccccaaaatccaacagcagttctcagacctcaagaggaagttggcagaagtcacagaagaagagtggctgagcatccccgaggttggcgatgccagaaataaacgtcagcggaacccacgctatgagaagctgacccctgttcctgacagtttctttgccaaacatttacagaccggagagaaccatacctcagtggatccccgacaaactcaatttggaggtcttaacacaccctatccaggtggactaaacactccatacccaggtggaatgacgccaggactgatgacacctggcacaggtgagctggacatgaggaagattggccaagcgaggaacactctgatggacatgaggctgagccaggtgtctgactccgtgagtggacagaccgtcgttgaccccaaaggctacctgacggatttaaattccatgatcccgacacacggaggagacatcaatgatatcaagaaggcgcgactgctcctcaagtctgttcgggagacgaaccctcatcacccgccagcctggattgcatcagcccgcctggaagaagtcactgggaagctacaagtagctcggaaccttatcatgaaggggacggagatgtgccccaagagtgaagatgtctggctggaagcagccaggttgcagcctggggacacagccaaggccgtggtagcccaagctgtccgtcatctcccacagtctgtcaggatttacatcagagccgcagagctggaaacggacattcgtgcaaagaagcgggttcttcggaaagccctcgagcatgttccaaactcggttcgcttgtggaaagcagccgttgagctggaagaacctgaagatgctagaatcatgctgagccgagctgtggagtgctgccccaccagcgtggagctctggcttgctctggcaaggctggagacctatgaaaatgcccgcaaggtcttgaacaaggcgcgggagaacattcctacagaccgacatatctggatcacggctgctaagctggaggaagccaatgggaacacgcagatggtggagaagatcatcgaccgagccatcacctcgctgcgggccaacggtgtggagatcaaccgtgagcagtggatccaggatgccgaggaatgtgacagggctgggagtgtggccacctgccaggccgtcatgcgtgccgtgattgggattgggattgaggaggaagatcggaagcatacctggatggaggatgctgacagttgtgtagcccacaatgccctggagtgtgcacgagccatctacgcctacgccctgcaggtgttccccagcaagaagagtgtgtggctgcgcgccgcgtacttcgagaagaaccatggcactcgggagtccctggaagcactcctgcagagggctgtggcccactgccccaaagcagaggtgctgtggctcatgggcgccaagtccaagtggctggcaggggatgtgcctgcagcaaggagcatcctggccctggccttccaggccaaccccaacagtgaggagatctggctggcagccgtgaagctggagtccgagaatgatgagtacgagcgggcccggaggctgctggccaaggcgcggagcagtgcccccaccgcccgggtgttcatgaagtctgtgaagctggagtgggtgcaagacaacatcagggcagcccaagatctgtgcgaggaggccctgcggcactatgaggacttccccaagctgtggatgatgaaggggcagatcgaggagcagaaggagatgatggagaaggcgcgggaagcctataaccaggggttgaagaagtgtccccactccacacccctgtggcttttgctctctcggctggaggagaagattgggcagcttactcgagcacgggccattttggaaaagtctcgtctgaagaacccaaagaaccctgggctgtggttggagtccgtgcggctggagtaccgtgcggggctgaagaacatcgcaaatacactcatggccaaggcgctgcaggagtgccccaactccggtatcctgtggtctgaggccatcttcctcgaggcaaggccccagaggaggaccaagagcgtggatgccctgaagaagtgtgagcatgacccccatgtgctcctggccgtggccaagctgttttggagtcagcggaagatcaccaaggccagggagtggttccaccgcactgtgaagattgactcggacctgggggatgcctgggccttcttctacaagtttgagctgcagcatggcactgaggagcagcaggaggaggtgaggaagcgctgtgagagtgcagagcctcggcatggggagctgtggtgcgccgtgtccaaggacatcgccaactggcagaagaagatcggggacatccttaggctggtggccggccgcatcaagaacaccttctga

SEQ ID NO: 648 - DNA, 771 bp, Homo sapiens
  source 1..771: mol_type = genomic DNA
atgaagctgacgcggaagatggttctgacccgggccaaggcctcggagctgcacagcgtgcgcaagctcaactgctggggcagccgcctcacagatatctccatttgccaggagatgcccagcctggaggtgatcacgctcagtgtcaacagcatctccaccctggagcctgtgagccggtgccagcgcctgagtgagctgtacctgcggaggaaccgcatccccagcctggctgagctcttctacctgaaggggctgccgcgtctgcgggtgctgtggctggccgagaacccgtgctgcggcaccagcccccaccgctaccgcatgaccgtgctgcgcaccctgccgcgcctacagaagctggacaaccaggctgtgacggaggaggagctgtcccgtgcactgagtgagggagaggagatcactgcggccccagagagagagggcacaggccacggcggccccaagctatgctgcacactgagctccctcagctccgctgctgagactggccgggacccgctggacagcgaggaggaggcaaccagcggcgcccaggatgaacgtggcctgaagccgccttcccggggccagtttccttccctctcagccagggatgcctcgagcagccacaggggcaggaacgtcctgactgccatcctgctgctgctgcgggagctggatgcagaggggctggaggccgtgcagcagactgtgggcagccggctgcaggccctgcgtggggaagaggtgcaggagcacgccgagtga

SEQ ID NO: 649 - DNA, 2211 bp, Homo sapiens
  source 1..2211: mol_type = genomic DNA
atggaggcgctaattcctgtcataaacaagctccaggacgtcttcaacacggtgggcgccgacatcatccagctgcctcaaatcgtcgtagtgggaacgcagagcagcggaaagagctcagtgctagaaagcctggtggggagggacctgcttcccagaggtactggaattgtcacccggagacctctcattctgcaactggtccatgtttcacaagaagataaacggaaaacaacaggagaagaaaatggggtggaagcagaagaatggggtaaatttcttcacaccaaaaataagctttacacggattttgatgaaattcgacaagaaattgaaaatgaaacagaaagaatttcaggaaataataagggagtaagccctgaaccaattcatcttaagattttttcacccaacgttgtcaatttgacacttgtggatttgccaggaatgaccaaggtgcctgtaggtgatcaacctaaggatattgagcttcaaatcagagagctcattcttcggttcatcagtaatcctaattccattatcctcgctgtcactgctgctaatacagatatggcaacatcagaggcacttaaaatttcaagagaggtagatccagatggtcgcagaaccctagctgtaatcactaaacttgatctcatggatgcgggtactgatgccatggatgtattgatgggaagggttattccagtcaaacttggaataattggagtagttaacaggagccagctagatattaacaacaagaagagtgtaactgattcaatccgtgatgagtatgcttttcttcaaaagaaatatccatctctggccaatagaaatggaacaaagtatcttgctaggactctaaacaggttactgatgcatcacatcagagattgtttaccagagttgaaaacaagaataaatgttctagctgctcagtatcagtctcttctaaatagctacggtgaacccgtggatgataaaagtgctactttactccaacttattaccaaatttgccacagaatattgtaacactattgaaggaactgcaaaatatattgaaacttcggagctatgcggtggtgctagaatttgttatattttccatgagacttttgggcgaaccttagaatctgttgatccacttggtggccttaacactattgacattttgactgccattagaaatgctactggtcctcgtcctgctttatttgtgcctgaggtttcatttgagttactggtgaagcggcaaatcaaacgtctagaagagcccagcctccgctgtgtggaactggttcatgaggaaatgcaaaggatcattcagcactgtagcaattacagtacacaggaattgttacgatttcctaaacttcatgatgccatagttgaagtggtgacttgtcttcttcgtaaaaggttgcctgttacaaatgaaatggtccataacttagtggcaattgaactggcttatatcaacacaaaacatccagactttgctgatgcttgtgggctaatgaacaataatatagaggaacaaaggagaaacaggctagccagagaattaccttcagctgtatcacgagacaagtcttctaaagttccaagtgctttggcacctgcctcccaggagccctcccccgctgcttctgctgaggctgatggcaagttaattcaggacagcagaagagaaactaaaaatgttgcatctggaggtggtggggttggagatggtgttcaagaaccaaccacaggcaactggagaggaatgctgaaaacttcaaaagctgaagagttattagcagaagaaaaatcaaaacccattccaattatgccagccagtccacaaaaaggtcatgccgtgaacctgctagatgtgccagttcctgttgcacgaaaactatctgctcgggaacagcgagattgtgaggttattgaacgactcattaaatcatattttctcattgtcagaaagaatattcaagacagtgtgccaaaggcagtaatgcattttttggttaatcatgtgaaagacactcttcagagtgagctagtaggccagctgtataaatcatccttattggatgatcttctgacagaatctgaggacatggcacagcgcaggaaagaagcagctgatatgctaaaggcattacaaggagccagtcaaattattgctgaaatccgggagactcatctttggtga

SEQ ID NO: 650 - DNA, 636 bp, Homo sapiens
  source 1..636: mol_type = genomic DNA
atgaccccttggctcgggctcatcgtgctcctgggcagctggagcctgggggactggggcgccgaggcgtgcacatgctcgcccagccacccccaggacgccttctgcaactccgacatcgtgatccgggccaaggtggtggggaagaagctggtaaaggaggggcccttcggcacgctggtctacaccatcaagcagatgaagatgtaccgaggcttcaccaagatgccccatgtgcagtacatccatacggaagcttccgagagtctctgtggccttaagctggaggtcaacaagtaccagtacctgctgacaggtcgcgtctatgatggcaagatgtacacggggctgtgcaacttcgtggagaggtgggaccagctcaccctctcccagcgcaaggggctgaactatcggtatcacctgggttgtaactgcaagatcaagtcctgctactacctgccttgctttgtgacttccaagaacgagtgtctctggaccgacatgctctccaatttcggttaccctggctaccagtccaaacactacgcctgcatccggcagaagggcggctactgcagctggtaccgaggatgggcccccccggataaaagcatcatcaatgccacagacccctga

SEQ ID NO: 651 - DNA, 561 bp, Homo sapiens
  source 1..561: mol_type = genomic DNA
atggtgaagctggcagccaaatgcatcctggcaggagacccagcagtgggcaagaccgccctggcacagatcttccgcagtgatggagcccatttccagaaaagctacaccctgacaacaggaatggatttggtggtgaagacagtgccagttcctgacacgggagacagtgtggaactcttcatttttgactctgctggcaaggagctgttttcggaaatgctggataaattgtgggagagtcccaatgtcttatgtctcgtctatgatgtgaccaatgaagaatccttcaacaactgcagcaagtggctggagaaggctcggtcacaggctccaggcatctctctcccaggtgttttagttgggaacaagacagacctggccggcagacgagcagtggactcagctgaggcccgggcatgggcgctgggccagggcctggaatgttttgaaacatccgtgaaagagatggaaaacttcgaagcccctttccactgccttgccaagcagttccaccagctgtaccgggagaaggtggaggttttccgggccctggcatga

SEQ ID NO: 652 - DNA, 2112 bp, Homo sapiens
  source 1..2112: mol_type = genomic DNA
atggagcgcgccgcgccgtcgcgccgggtcccgcttccgctgctgctgctcggcggccttgcgctgctggcggccggagtggacgcggatgtcctcctggaggcctgctgtgcggacggacaccggatggccactcatcagaaggactgctcgctgccatatgctacggaatccaaagaatgcaggatggtgcaggagcagtgctgccacagccagctggaggagctgcactgtgccacgggcatcagcctggccaacgagcaggaccgctgtgccacgccccacggtgacaacgccagcctggaggccacatttgtgaagaggtgctgccattgctgtctgctggggagggcggcccaggcccagggccagagctgcgagtacagcctcatggttggctaccagtgtggacaggtcttccaggcatgctgtgtcaagagccaggagaccggagatttggatgtcgggggcctccaagaaacggataagatcattgaggttgaggaggaacaagaggacccatatctgaatgaccgctgccgaggaggcgggccctgcaagcagcagtgccgagacacgggtgacgaggtggtctgctcctgcttcgtgggctaccagctgctgtctgatggtgtctcctgtgaagatgtcaatgaatgcatcacgggcagccacagctgccggcttggagaatcctgcatcaacacagtgggctctttccgctgccagcgggacagcagctgcgggactggctatgagctcacagaggacaatagctgcaaagatattgacgagtgtgagagtggtattcataactgcctccccgattttatctgtcagaatactctgggatccttccgctgccgacccaagctacagtgcaagagtggctttatacaagatgctctaggcaactgtattgatatcaatgagtgtttgagtatcagtgccccgtgccctatcgggcatacatgcatcaacacagagggctcctacacgtgccagaagaacgtgcccaactgtggccgtggctaccatctcaacgaggagggaacgcgctgtgttgatgtggacgagtgcgcgccacctgctgagccctgtgggaagggacatcgctgcgtgaactctcccggcagtttccgctgcgaatgcaagacgggttactattttgacggcatcagcaggatgtgtgtcgatgtcaacgagtgccagcgctaccccgggcgcctgtgtggccacaagtgcgagaacacgctgggctcctacctctgcagctgttccgtgggcttccggctctctgtggatggcaggtcatgtgaagacatcaatgagtgcagcagcagcccctgtagccaggagtgtgccaacgtctacggctcctaccagtgttactgccggcgaggctaccagctcagcgatgtggatggagtcacctgtgaagacatcgacgagtgcgccctgcccaccgggggccacatctgctcctaccgctgcatcaacatccctggaagcttccagtgcagctgcccctcgtctggctacaggctggcccccaatggccgcaactgccaagacattgatgagtgtgtgactggcatccacaactgctccatcaacgagacctgcttcaacatccagggcggcttccgctgcctggccttcgagtgccctgagaactaccgccgctccgcagccacgctccagcaggagaagacagacacggtccgctgcatcaagtcctgccgccccaacgatgtcacatgcgtgttcgaccccgtgcacaccatctcccacaccgtcatctcgctgcctaccttccgcgagttcacccgccctgaagagatcatcttcctccgggccatcacgccaccgcatcctgccagccaggctaacatcatcttcgacatcacggaagggaacctgcgggactcttttgacatcatcaagcgttacatggacggcatgaccgtgggtgtcgtgcgccaggtgcggcccatcgtgggcccatttcatgccgtcctgaagctggagatgaactatgtggtcgggggcgtggtctcccaccgaaatgttgtcaacgtccacatcttcgtctctgagtactggttctga

SEQ ID NO: 653 - DNA, 213 bp, Homo sapiens
  source 1..213: mol_type = genomic DNA
atggccccgtggagccgagaggcggtgctgagtctctatcgggctctgttgcgccagggccgacagcttcgctacactgatcgagacttctactttgcctccatccgccgtgaattccgaaaaaatcagaagctagaggacgctgaggcccgggagaggcagctggagaagggcctggtctttctcaacggcaaattggggaggatcatttag

SEQ ID NO: 654 - DNA, 2343 bp, Homo sapiens
  source 1..2343: mol_type = genomic DNA
atggcgccctacagcctactggtgactcggctgcagaaagctctgggtgtgcggcagtaccatgtggcctcagtcctgtgccaacgggccaaggtggcgatgagccactttgagcccaacgagtacatccattatgacctgctagagaagaacattaacattgttcgcaaacgactgaaccggccgctgacactctcggagaagattgtgtatggacacctggatgaccccgccagccaggaaattgagcgaggcaagtcgtacctgcggctgcggccggaccgtgtggccatgcaggatgcgacggcccagatggccatgctccagttcatcagcagcgggctgtccaaggtggctgtgccatccaccatccactgtgaccatctgattgaagcccaggttgggggcgagaaagacctgcgccgggccaaggacatcaaccaggaagtttataatttcctggcaactgcaggtgccaaatatggcgtgggcttctggaagcctggatctggaatcattcaccagattattctggaaaactatgcgtaccctggtgttcttctgattggcactgactcccacacccccaatggtggcggccttgggggcatctgcattggagttgggggtgccgatgctgtggatgtcatggctgggatcccctgggagctgaagtgccccaaggtgattggcgtgaagctgacgggctctctctccggttggtcctcacccaaagatgtgatcctgaaggtggcaggcatcctcacggtgaaaggtggcacaggtgcaatcgtggaataccacgggcctggtgtagactccatctcctgcactggcatggcgacaatctgcaacatgggtgcagaaattggggccaccacttccgtgttcccttacaaccacaggatgaagaagtacctgagcaagaccggccgggaagacattgccaatctagctgatgaattcaaggatcacttggtgcctgaccctggctgccattatgaccaactaattgaaattaacctcagtgagctgaagccacacatcaatgggcccttcacccctgacctggctcaccctgtggcagaagtgggcaaggtggcagagaaggaaggatggcctctggacatccgagtgggtctaattggtagctgcaccaattcaagctatgaagatatggggcgctcagcagctgtggccaagcaggcactggcccatggcctcaagtgcaagtcccagttcaccatcactccaggttccgagcagatccgcgccaccattgagcgggacggctatgcacagatcttgagggatctgggtggcattgtcctggccaatgcttgtggcccctgcattggccagtgggacaggaaggacatcaagaagggggagaagaacacaatcgtcacctcctacaacaggaacttcacgggccgcaacgacgcaaaccccgagacccatgcctttgtcacgtccccagagattgtcacagccctggccattgcgggaaccctcaagttcaacccagagaccgactacctgacgggcacggatggcaagaagttcaggctggaggctccggatgcagatgagcttcccaaaggggagtttgacccagggcaggacacctaccagcacccacccaaggacagcagcgggcagcatgtggacgtgagccccaccagccagcgcctgcagctcctggagccttttgacaagtgggatggcaaggacctggaggacctgcagatcctcatcaaggtcaaagggaagtgtaccactgaccacatctcagctgctggcccctggctcaagttccgtgggcacttggataacatctccaacaacctgctcattggtgccatcaacattgaaaacggcaaggccaactccgtgcgcaatgccgtcactcaggagtttggccccgtccctgacactgcccgctactacaagaaacatggcatcaggtgggtggtgatcggagacgagaactacggcgagggctcgagccgggagcatgcagctctggagcctcgccaccttgggggccgggccatcatcaccaagagctttgccaggatccacgagaccaacctgaagaaacagggcctgctgcctctgaccttcgctgacccggctgactacaacaagattcaccctgtggacaagctgaccattcagggcctgaaggacttcacccctggcaagcccctgaagtgcatcatcaagcaccccaacgggacccaggagaccatcctcctgaaccacaccttcaacgagacgcagattgagtggttccgcgctggcagtgccctcaacagaatgaaggaactgcaacagtga

SEQ ID NO: 655 - DNA, 5460 bp, Homo sapiens
  source 1..5460: mol_type = genomic DNA
atggccagcatcacgcagctgttcgacgacctgtgtgaggccctcctgccggctgccaagactcacctgggccagcgcagtgtgaaccggaagagggcaaagcggagcctcaagaaggtggcctacaatgctcttttcacaaatctttttcaagatgagactcaacagctgcagcctgacatgtcaaaactaccagcgagaaacaagatcctcatgttgtcctttgacttgagagtgggtggcctgggccccaaggccgaccgtttggaggagcttgtggaggagctggaagcagccccttgctgtccgcttttggaggtggggtctgttttggacctcctggttcagctggcagggagtggtccccctcaagttctgccgagaaaacgagactacttccttaacaacaagcatgtggggagaaacgttccgtacagcggctatgattgcgacgacctgagtgtgtttgagatggacgttcagtctctgatctccagagaagagtgtttgtgtcacagcatgatccaggaaacacttcaggttatggaggctgctccaggcactggcctgcccaccgtcgggctcttctcatttggtgacccttgtggtgacaggttcgagagagacacccgggtctcgctcttcggggcccttgtgcacagccgcacttatgacatggacgtccgactgggcctgccccccgtgccagacaatgcggacctctctgggctggctattaaggtcccaccgagtgtggatcagtgggaagacgaaggattccagtcagcgtccaacttgactcctgattcccagtctgagcccagcgtgaccccagacgtggacctgtgggaagccgcacttacctatgaggccagcaagcggaggtgctgggagcgagttggctgcccccctggccacagagaggagccttacctgacggaggcgggaagggacgctttcgacaagttctgcaggctccaccaaggggagctccagctgcttgctgggggcgtcctacaggccccgcagcccgtgctggtgaaggagtgcgagctggtgaaagacgtgctgaacgtcttgattggggtcgtgtctgccacgttttcgctctgccagccggcccaggcctttgtggtgaagcggggcgtccacgtgtcaggagcgtctcccgagagcatcagcagcctgctctcggaagtggccgagtatgggacctgctacacgcgcctgagtcatttctctctgcagcccgtcctggactctttgtacagcaagggcctcgtgttccaggccttcaccagtggcctgaggaggtacctgcagtattaccgggcctgcgtcctttccactccgcccaccctgagcctcctcaccattggttttctcttcaagaaacttggccggcagctcaggtacctggccgagctctgtggcgttggcgctgtgctcccgggcacctgtggaggaggccccagggccgcgtttcccaccggcgtgaagctgctgtcctacctctaccaggaggctctgcacaactgcagcaacgagcactaccctgtactgctgtccctgctgaagaccagctgcgagccctacacccggttcatccacgactgggtgtacagcggggtgttcagagacgcttatggcgagttcatgattcaggtgaaccacgagtacctcagcttccgagataagttgtactggacacatggctacgtgctcatctccaaagaggtggaggactgtgttcccgtgtttctgaagcacattgcccacgacatatacgtctgcggaaagaccattaacctgctgaagctctgctgcccccggcattacctctgttggtccgacgtccctgtcccccggatctcggtgattttctcccttgaggagttgaaggagattgagaaggactgtgccgtctacgttgggcgcatggagagggtggcccgccacagctctgtcagcaaggaggagaaggaattacgtatggaaattgcaaaacaagaattaatcgctcatgcccgggaagcagcatccagggtcctgagtgcactgagtgaccggcagatgtcagaacggatggccttggatgcccggaagcgtgagcagtttcagaggctgaaagaacaatttgtgaaggaccaggagcgacgccaggcggccaggcaggaggagctggatgatgacttcagctacgcccgtgaactccgagacagggagagaaggctgaagtccctggaggaggagctggagaggaaggcgaggcaggcactggtcgaccactacagcaagctctctgcagaggcagctcgtcgggagcagaaggcactgtggagaatccagaggcaccgactggagagtgcacggcttcgttttctcttagaagatgagaaacacattcaggagatgctgaaagcagtgtctgaggctcaccagccccaggagccgccagacgtcctcttgagcgtgcacccccaggtcacgtctccgggccctgagcacccagagggaggccaaggctgtgattctgggtctgcagagcaacactcgcctgcctgggatggctggaacaggccaggcctgctgaccccacagccccttaagcctctagcagtgggggctggtggcagggggctgcagcaggcggagggggccagacccttctctgacagcctcagcattggagacttcctacctgtgggcccaggggctgagccgtccgtgcagactggcatggtccctctcctggaggtggcgctgcagaccattaacttggacctgcccccctcagctcctggggaggcacccgcagcagccagcactcagccctccaggccacaggagtacgactttagtactgtcctgaggccagctgtggccacctcacctgcaccagggcccctgcaggctgcagagtgcagcttgggcagctcagggctacagctgtgggaggacagttgtgggaagatggatgcctgtggctccgcctcgcgggagactctgctcccctcacacccacccaggcgtgctgctctggaggaggggagcagccagcccacagagcggctctttgggcaggtgtcagggggtggtcttcccacaggggactacgcttctgaaatagctcccacccggccacggtggaacacccacgggcacgtgtctgacgccagcatcagggtcggggagaatgtgtcagatgtggctcccacccagccacggtggaacacccacggacacgtatccaatgccagcatcagcttaggggagtctgtgtcagatgtggctcccactcggccacggtggaacatccatggacatgtgtccaacgccagcatcagggtcggggagaatgtgtcagatgtggctcccaccaggccacggtggaatacccacgggcacgtgtccaacgccagcatcagggttggggagaacgtgtcggacgtggctcccacccggccacggtggaacacccatggacacgtgtccgatgccagcatcagcttgggggagtctgtgtcagacatggctcccgcccggccacggtggaacacccatggacacgtgtctgatgccagcatcagcttgggggagtctgtgtcagacatggctcccacccggccacggtggaacacccacggacatgtgtctgacaccagcatcagggttggggagaacgtatcggacgtggctcccatccggtcacggtgcaacacccatggacacgtgtccgacgccagcatcagcttgggggagcctgtgtcggatgtggtttccacccggccacggtggaacacccatgtacccatccctccgccccacatggtgctgggggctctctcaccagaagctgagcccaacacacccaggccccaacagagcccccctggccacacgtcccagtcagcgctcagcctgggagcacagagcactgtgctggactgtgggccacggctgcctgtagaagtggggccatctctgtcctcccccagctcgggctgcggggaggggagcatcagcgtgggggagaacgtgtcagacgtggctcccacccaaccatggtggcccaacaccccgggagacagtgtctctgaagaactaggccctgggaggagcggggacactgaggacctctctccaaattggcctctcaactcacaggaagacacagctgcccagagcagcccaggccgtggtgaggaggcggaggcatcggcggcggaggctcagggtggggagcaggcctacctggcaggcctggcagggcagtaccacttggagcggtacccggacagttacgagtccatgtccgagccgcccattgctcatcttttgcgccccgtgcttccccgggccttcgccttccccgtggacccccaggtccagtctgccgctgatgagactgctgtgcagctgagcgagttgctgacgctgcccgtgctcatgaagcgctccatcacggcaccgctggccgcccacatctccttggtgaacaaggccgctgtcgactacttcttcgtggagctgcacctggaggcgcactatgaggcactgcggcacttcctgctgatggaggacggcgagttcgcccagtccctcagcgacctgctctttgagaagcttggagctgggcaaacgcccggagagctgctcaacccgctggtgctgaactctgtgctgagcaaggccctgcagtgcagcctgcatggggacaccccgcacgcctccaacctctccctcgctctcaagtacctgcccgaggtgtttgcccccaacgccccggatgtgctgagctgcctggagctcaggtacaaggtggactggcctctcaacattgtcatcaccgagggctgcgtgagcaagtacagcggcgtcttctccttcctgctgcagctgaagctcatgatgtgggcgctcaaggacgtctgcttccacctcaagcgcacagccctgctgagccacatggccggctctgtgcagttccgtcagctgcagctgttcaagcacgagatgcagcatttcgtgaaggtcatccagggctacatcgccaaccagatcctgcacgtcacctggtgcgagttcagggccaggttggccaccgtgggcgacctggaggagatccagcgtgcgcacgcagagtacctgcacaaggccgtcttcaggggcctgctcacggagaaggcggcgcccgtcatgaacgtcatccacagcatcttcagcctcgtgctcaagttccgcagccagctcatctcccaggcctgggggccccctgggggcccgcggggtgcagagcaccccaactttgcactcatgcagcagtcctacaacaccttcaagtactactcccactttctcttcaaagtggtgaccaagctggtgaaccgcggctaccagccccacctggaggactttctgctgcgcatcaacttcaacaactactaccaggacgcctga

SEQ ID NO: 656 - DNA, 3039 bp, Homo sapiens
  source 1..3039: mol_type = genomic DNA
atgatggcgcagtccaacatgtttaccgtggctgatgtgttgagtcaagatgaactgcgcaaaaagctataccagacgtttaaggatcggggtatactggatacactcaagacacaacttcgaaaccagctaattcatgagttgatgcaccctgtattgagtggagaactgcagcctcggtccatttcagtagaagggagctccctcttaataggcgcctctaactctttagtggcagatcacttacaaagatgtggctatgaatattcactttctgttttctttccagaaagtggtttggcaaaagaaaaggtatttactatgcaggatctattacaactcattaaaatcaaccctacttccagtctctacaaatcactggtttcaggatctgataaagaaaatcaaaaaggttttcttatgcattttttaaaagaattggcagaatatcatcaagctaaagagagttgtaatatggaaactcagacaagttcgacatttaacagagattctctggctgagaagcttcagcttattgatgatcagtttgcagatgcttaccctcagcgtatcaagttcgaatctttagaaataaagctaaatgagtataagagagaaatagaagagcaacttcgggcagaaatgtgtcaaaagttgaagttttttaaagataccgagatagcaaaaattaaaatggaagcaaaaaaaaagtatgaaaaggagttaaccatgttccagaatgattttgaaaaagcttgtcaagcaaaatctgaagctctcgttcttcgggaaaagagtacccttgaaagaattcacaagcaccaagagattgaaacaaaagaaatttatgctcaaaggcaacttttactaaaagatatggatttgctaagaggaagagaagcagagctgaagcaaagagttgaagcttttgaattgaaccagaagctccaggaagaaaaacataaaagcataactgaggcacttaggagacaggagcagaatataaagagttttgaggagacctatgaccgaaagctcaagaatgaacttctaaagtatcaacttgaactgaaggatgactacatcattagaactaatcgactgattgaagatgaaaggaagaataaagaaaaagctgttcatttgcaagaggagctcatagctattaattcaaaaaaggaggaactcaatcaatctgtaaatcgtgtgaaagaacttgagcttgaattagagtctgtcaaagcccagtctttggcaataacaaaacaaaaccatatgctgaatgaaaaggttaaagagatgagtgattattcactactaaaagaagagaaactggagcttctggcacaaaataaattacttaaacaacaactggaagagagtagaaatgaaaacctgcgtctcctaaaccgcctagctcagccggctcctgaacttgcagtctttcagaaagaactacggaaagccgaaaaggctatagtggttgagcatgaggagttcgaaagctgcaggcaagctctgcacaaacaactgcaagacgaaattgagcattctgcacagctgaaggcccagattctaggttacaaagcttctgtaaagagtttaactactcaggttgccgatttaaaattgcaactgaagcaaactcagacagccctagagaatgaagtgtactgcaatccaaagcagtctgtgatcgatcgttctgtcaatggattaataaatggcaatgtggtgccttgcaatggtgagataagtggggatttcttgaacaatccttttaaacaggaaaacgttctagcacgtatggttgcatcaaggatcacaaattatccaactgcatgggtggagggtagttcccctgattctgaccttgagtttgtagccaatactaaggcaagggtcaaagagcttcagcaagaggccgaacgcttggaaaaggctttcagaagttaccatcggagagtcattaaaaactctgccaaaagcccactagcagcaaagagcccaccatctctgcacttgctggaagccttcaaaaacattacttccagttccccggaaagacatatttttggagaggacagagttgtctctgagcagcctcaagtgggcacacttgaagaaaggaatgacgtcgtggaagcactgacaggcagtgcagcctcgaggctccgcgggggcacttcctccagacgcctctcttccacaccccttccaaaagcaaaaagaagcctcgaaagtgaaatgtatctggaaggtctgggcagatcacacattgcttcccccagtccttgtcctgacagaatgcccctaccatcacccactgagtctaggcacagcctctccatccctcctgtctccagccctccggagcagaaagtgggtctttatcgaagacaaactgaacttcaagacaaaagtgaattttcagatgtggacaagctagcttttaaggataatgaggagtttgaatcatcttttgaatctgcagggaacatgccaaggcagttggaaatgggcgggctttctcctgccggggatatgtctcatgtggacgctgctgcagctgctgtgcccctctcatatcagcacccaagtgtagatcagaaacaaattgaagaacaaaaggaagaagaaaaaatacgggaacagcaagtgaaagaacgaaggcagagagaagaaagaaggcagagtaacctacaagaagttttagaaagggaacgaagagaactagaaaaactgtatcaggaaaggaagatgattgaagaatcactgaagattaaaataaaaaaggaattagaaatggaaaatgaattagaaatgagtaatcaagaaataaaagacaaatctgctcacagtgaaaatcctttagagaaatacatgaaaatcatccagcaggagcaagaccaggagtcggcagataagagctcaaaaaagatggtccaagaaggctccctagtggacacgctgcaatctagtgacaaagtcgaaagtttaacaggcttttctcatgaagaactagacgactcttggtaa

SEQ ID NO: 657 - DNA, 675 bp, Homo sapiens
  source 1..675: mol_type = genomic DNA
atgtcacgcaagatagaaggctttttgttattacttctctttggctatgaagccacattgggattatcgtctaccgaggatgaaggcgaggacccctggtaccaaaaagcatgcaagtgcgattgccaaggaggacccaatgctctgtggtctgcaggtgccacctccttggactgtataccagaatgcccatatcacaagcctctgggtttcgagtcaggggaggtcacaccggaccagatcacctgctctaacccggagcagtatgtgggctggtattcttcgtggactgcaaacaaggcccggctcaacagtcaaggctttgggtgtgcctggctctccaagttccaggacagtagccagtggttacagatagatctgaaggagatcaaagtgatttcagggatcctcacccaggggcgctgtgacatcgatgagtggatgaccaagtacagcgtgcagtacaggaccgatgagcgcctgaactggatttactacaaggaccagactggaaacaaccgggtcttctatggcaactcggaccgcacctccacggttcagaacctgctgcggccccccatcatctcccgcttcatccgcctcatcccgctgggctggcacgtccgcattgccatccggatggagctgctggagtgcgtcagcaagtgtgcctga

SEQ ID NO: 658 - DNA, 1053 bp, Homo sapiens
  source 1..1053: mol_type = genomic DNA
atgggctgcttcttctccaagagacggaaggctgacaaggagtcgcggcccgagaacgaggaggagcggccaaagcagtacagctgggatcagcgcgagaaggttgatccaaaagactacatgttcagtggactgaaggatgaaacagtaggtcgcttacctgggacggtagcaggacaacagtttctcattcaagactgtgagaactgtaacatctatatttttgatcactctgctacagttaccattgatgactgtactaactgcataatttttctgggacccgtgaaaggcagcgtgtttttccggaattgcagagattgcaagtgcacattagcctgccaacaatttcgtgtgcgagattgtagaaagctggaagtctttttgtgttgtgccactcaacccatcattgagtcttcctcaaatatcaaatttggatgttttcaatggtactatcctgaattagctttccagttcaaagatgcagggctaagtatcttcaacaatacatggagtaacattcatgactttacacctgtgtcaggagaactcaactggagccttcttccagaagatgctgtggttcaggactatgttcctatacctactaccgaagagctcaaagctgttcgtgtttccacagaagccaatagaagcattgttccaatatcccggggtcagagacagaagagcagcgatgaatcatgcttagtggtattatttgctggtgattacactattgcaaatgccagaaaactaattgatgagatggttggtaaaggctttttcctagttcagacaaaggaagtgtccatgaaagctgaggatgctcaaagggtttttcgggaaaaagcacctgacttccttcctcttctgaacaaaggtcctgttattgccttggagtttaatggggatggtgctgtagaagtatgtcaacttattgtaaacgagatattcaatgggaccaagatgtttgtatctgaaagcaaggagacggcatctggagatgtagacagcttctacaactttgctgatatacagatgggaatatga

SEQ ID NO: 659 - DNA, 11058 bp, Homo sapiens
  source 1..11058: mol_type = genomic DNA
atgctttggtgggaagaagtagaggactgttatgaaagagaagatgttcaaaagaaaacattcacaaaatgggtaaatgcacaattttctaagtttgggaagcagcatattgagaacctcttcagtgacctacaggatgggaggcgcctcctagacctcctcgaaggcctgacagggcaaaaactgccaaaagaaaaaggatccacaagagttcatgccctgaacaatgtcaacaaggcactgcgggttttgcagaacaataatgttgatttagtgaatattggaagtactgacatcgtagatggaaatcataaactgactcttggtttgatttggaatataatcctccactggcaggtcaaaaatgtaatgaaaaatatcatggctggattgcaacaaaccaacagtgaaaagattctcctgagctgggtccgacaatcaactcgtaattatccacaggttaatgtaatcaacttcaccaccagctggtctgatggcctggctttgaatgctctcatccatagtcataggccagacctatttgactggaatagtgtggtttgccagcagtcagccacacaacgactggaacatgcattcaacatcgccagatatcaattaggcatagagaaactactcgatcctgaagatgttgataccacctatccagataagaagtccatcttaatgtacatcacatcactcttccaagttttgcctcaacaagtgagcattgaagccatccaggaagtggaaatgttgccaaggccacctaaagtgactaaagaagaacattttcagttacatcatcaaatgcactattctcaacagatcacggtcagtctagcacagggatatgagagaacttcttcccctaagcctcgattcaagagctatgcctacacacaggctgcttatgtcaccacctctgaccctacacggagcccatttccttcacagcatttggaagctcctgaagacaagtcatttggcagttcattgatggagagtgaagtaaacctggaccgttatcaaacagctttagaagaagtattatcgtggcttctttctgctgaggacacattgcaagcacaaggagagatttctaatgatgtggaagtggtgaaagaccagtttcatactcatgaggggtacatgatggatttgacagcccatcagggccgggttggtaatattctacaattgggaagtaagctgattggaacaggaaaattatcagaagatgaagaaactgaagtacaagagcagatgaatctcctaaattcaagatgggaatgcctcagggtagctagcatggaaaaacaaagcaatttacatagagttttaatggatctccagaatcagaaactgaaagagttgaatgactggctaacaaaaacagaagaaagaacaaggaaaatggaggaagagcctcttggacctgatcttgaagacctaaaacgccaagtacaacaacataaggtgcttcaagaagatctagaacaagaacaagtcagggtcaattctctcactcacatggtggtggtagttgatgaatctagtggagatcacgcaactgctgctttggaagaacaacttaaggtattgggagatcgatgggcaaacatctgtagatggacagaagaccgctgggttcttttacaagacatccttctcaaatggcaacgtcttactgaagaacagtgcctttttagtgcatggctttcagaaaaagaagatgcagtgaacaagattcacacaactggctttaaagatcaaaatgaaatgttatcaagtcttcaaaaactggccgttttaaaagcggatctagaaaagaaaaagcaatccatgggcaaactgtattcactcaaacaagatcttctttcaacactgaagaataagtcagtgacccagaagacggaagcatggctggataactttgcccggtgttgggataatttagtccaaaaacttgaaaagagtacagcacagatttcacaggctgtcaccaccactcagccatcactaacacagacaactgtaatggaaacagtaactacggtgaccacaagggaacagatcctggtaaagcatgctcaagaggaacttccaccaccacctccccaaaagaagaggcagattactgtggattctgaaattaggaaaaggttggatgttgatataactgaacttcacagctggattactcgctcagaagctgtgttgcagagtcctgaatttgcaatctttcggaaggaaggcaacttctcagacttaaaagaaaaagtcaatgccatagagcgagaaaaagctgagaagttcagaaaactgcaagatgccagcagatcagctcaggccctggtggaacagatggtgaatgagggtgttaatgcagatagcatcaaacaagcctcagaacaactgaacagccggtggatcgaattctgccagttgctaagtgagagacttaactggctggagtatcagaacaacatcatcgctttctataatcagctacaacaattggagcagatgacaactactgctgaaaactggttgaaaatccaacccaccaccccatcagagccaacagcaattaaaagtcagttaaaaatttgtaaggatgaagtcaaccggctatcagatcttcaacctcaaattgaacgattaaaaattcaaagcatagccctgaaagagaaaggacaaggacccatgttcctggatgcagactttgtggcctttacaaatcattttaagcaagtcttttctgatgtgcaggccagagagaaagagctacagacaatttttgacactttgccaccaatgcgctatcaggagaccatgagtgccatcaggacatgggtccagcagtcagaaaccaaactctccatacctcaacttagtgtcaccgactatgaaatcatggagcagagactcggggaattgcaggctttacaaagttctctgcaagagcaacaaagtggcctatactatctcagcaccactgtgaaagagatgtcgaagaaagcgccctctgaaattagccggaaatatcaatcagaatttgaagaaattgagggacgctggaagaagctctcctcccagctggttgagcattgtcaaaagctagaggagcaaatgaataaactccgaaaaattcagaatcacatacaaaccctgaagaaatggatggctgaagttgatgtttttctgaaggaggaatggcctgcccttggggattcagaaattctaaaaaagcagctgaaacagtgcagacttttagtcagtgatattcagacaattcagcccagtctaaacagtgtcaatgaaggtgggcagaagataaagaatgaagcagagccagagtttgcttcgagacttgagacagaactcaaagaacttaacactcagtgggatcacatgtgccaacaggtctatgccagaaaggaggccttgaagggaggtttggagaaaactgtaagcctccagaaagatctatcagagatgcacgaatggatgacacaagctgaagaagagtatcttgagagagattttgaatataaaactccagatgaattacagaaagcagttgaagagatgaagagagctaaagaagaggcccaacaaaaagaagcgaaagtgaaactccttactgagtctgtaaatagtgtcatagctcaagctccacctgtagcacaagaggccttaaaaaaggaacttgaaactctaaccaccaactaccagtggctctgcactaggctgaatgggaaatgcaagactttggaagaagtttgggcatgttggcatgagttattgtcatacttggagaaagcaaacaagtggctaaatgaagtagaatttaaacttaaaaccactgaaaacattcctggcggagctgaggaaatctctgaggtgctagattcacttgaaaatttgatgcgacattcagaggataacccaaatcagattcgcatattggcacagaccctaacagatggcggagtcatggatgagctaatcaatgaggaacttgagacatttaattctcgttggagggaactacatgaagaggctgtaaggaggcaaaagttgcttgaacagagcatccagtctgcccaggagactgaaaaatccttacacttaatccaggagtccctcacattcattgacaagcagttggcagcttatattgcagacaaggtggacgcagctcaaatgcctcaggaagcccagaaaatccaatctgatttgacaagtcatgagatcagtttagaagaaatgaagaaacataatcaggggaaggaggctgcccaaagagtcctgtctcagattgatgttgcacagaaaaaattacaagatgtctccatgaagtttcgattattccagaaaccagccaattttgagcagcgtctacaagaaagtaagatgattttagatgaagtgaagatgcacttgcctgcattggaaacaaagagtgtggaacaggaagtagtacagtcacagctaaatcattgtgtgaacttgtataaaagtctgagtgaagtgaagtctgaagtggaaatggtgataaagactggacgtcagattgtacagaaaaagcagacggaaaatcccaaagaacttgatgaaagagtaacagctttgaaattgcattataatgagctgggagcaaaggtaacagaaagaaagcaacagttggagaaatgcttgaaattgtcccgtaagatgcgaaaggaaatgaatgtcttgacagaatggctggcagctacagatatggaattgacaaagagatcagcagttgaaggaatgcctagtaatttggattctgaagttgcctggggaaaggctactcaaaaagagattgagaaacagaaggtgcacctgaagagtatcacagaggtaggagaggccttgaaaacagttttgggcaagaaggagacgttggtggaagataaactcagtcttctgaatagtaactggatagctgtcacctcccgagcagaagagtggttaaatcttttgttggaataccagaaacacatggaaacttttgaccagaatgtggaccacatcacaaagtggatcattcaggctgacacacttttggatgaatcagagaaaaagaaaccccagcaaaaagaagacgtgcttaagcgtttaaaggcagaactgaatgacatacgcccaaaggtggactctacacgtgaccaagcagcaaacttgatggcaaaccgcggtgaccactgcaggaaattagtagagccccaaatctcagagctcaaccatcgatttgcagccatttcacacagaattaagactggaaaggcctccattcctttgaaggaattggagcagtttaactcagatatacaaaaattgcttgaaccactggaggctgaaattcagcagggggtgaatctgaaagaggaagacttcaataaagatatgaatgaagacaatgagggtactgtaaaagaattgttgcaaagaggagacaacttacaacaaagaatcacagatgagagaaagcgagaggaaataaagataaaacagcagctgttacagacaaaacataatgctctcaaggatttgaggtctcaaagaagaaaaaaggctctagaaatttctcatcagtggtatcagtacaagaggcaggctgatgatctcctgaaatgcttggatgacattgaaaaaaaattagccagcctacctgagcccagagatgaaaggaaaataaaggaaattgatcgggaattgcagaagaagaaagaggagctgaatgcagtgcgtaggcaagctgagggcttgtctgaggatggggccgcaatggcagtggagccaactcagatccagctcagcaagcgctggcgggaaattgagagcaaatttgctcagtttcgaagactcaactttgcacaaattcacactgtccgtgaagaaacgatgatggtgatgactgaagacatgcctttggaaatttcttatgtgccttctacttatttgactgaaatcactcatgtctcacaagccctattagaagtggaacaacttctcaatgctcctgacctctgtgctaaggactttgaagatctctttaagcaagaggagtctctgaagaatataaaagatagtctacaacaaagctcaggtcggattgacattattcatagcaagaagacagcagcattgcaaagtgcaacgcctgtggaaagggtgaagctacaggaagctctctcccagcttgatttccaatgggaaaaagttaacaaaatgtacaaggaccgacaagggcgatttgacagatctgttgagaaatggcggcgttttcattatgatataaagatatttaatcagtggctaacagaagctgaacagtttctcagaaagacacaaattcctgagaattgggaacatgctaaatacaaatggtatcttaaggaactccaggatggcattgggcagcggcaaactgttgtcagaacattgaatgcaactggggaagaaataattcagcaatcctcaaaaacagatgccagtattctacaggaaaaattgggaagcctgaatctgcggtggcaggaggtctgcaaacagctgtcagacagaaaaaagaggctagaagaacaaaagaatatcttgtcagaatttcaaagagatttaaatgaatttgttttatggttggaggaagcagataacattgctagtatcccacttgaacctggaaaagagcagcaactaaaagaaaagcttgagcaagtcaagttactggtggaagagttgcccctgcgccagggaattctcaaacaattaaatgaaactggaggacccgtgcttgtaagtgctcccataagcccagaagagcaagataaacttgaaaataagctcaagcagacaaatctccagtggataaaggtttccagagctttacctgagaaacaaggagaaattgaagctcaaataaaagaccttgggcagcttgaaaaaaagcttgaagaccttgaagagcagttaaatcatctgctgctgtggttatctcctattaggaatcagttggaaatttataaccaaccaaaccaagaaggaccatttgacgttaaggaaactgaaatagcagttcaagctaaacaaccggatgtggaagagattttgtctaaagggcagcatttgtacaaggaaaaaccagccactcagccagtgaagaggaagttagaagatctgagctctgagtggaaggcggtaaaccgtttacttcaagagctgagggcaaagcagcctgacctagctcctggactgaccactattggagcctctcctactcagactgttactctggtgacacaacctgtggttactaaggaaactgccatctccaaactagaaatgccatcttccttgatgttggaggtacctgctctggcagatttcaaccgggcttggacagaacttaccgactggctttctctgcttgatcaagttataaaatcacagagggtgatggtgggtgaccttgaggatatcaacgagatgatcatcaagcagaaggcaacaatgcaggatttggaacagaggcgtccccagttggaagaactcattaccgctgcccaaaatttgaaaaacaagaccagcaatcaagaggctagaacaatcattacggatcgaattgaaagaattcagaatcagtgggatgaagtacaagaacaccttcagaaccggaggcaacagttgaatgaaatgttaaaggattcaacacaatggctggaagctaaggaagaagctgagcaggtcttaggacaggccagagccaagcttgagtcatggaaggagggtccctatacagtagatgcaatccaaaagaaaatcacagaaaccaagcagttggccaaagacctccgccagtggcagacaaatgtagatgtggcaaatgacttggccctgaaacttctccgggattattctgcagatgataccagaaaagtccacatgataacagagaatatcaatgcctcttggagaagcattcataaaagggtgagtgagcgagaggctgctttggaagaaactcatagattactgcaacagttccccctggacctggaaaagtttcttgcctggcttacagaagctgaaacaactgccaatgtcctacaggatgctacccgtaaggaaaggctcctagaagactccaagggagtaaaagagctgatgaaacaatggcaagacctccaaggtgaaattgaagctcacacagatgtttatcacaacctggatgaaaacagccaaaaaatcctgagatccctggaaggttccgatgatgcagtcctgttacaaagacgtttggataacatgaacttcaagtggagtgaacttcggaaaaagtctctcaacattaggtcccatttggaagccagttctgaccagtggaagcgtctgcacctttctctgcaggaacttctggtgtggctacagctgaaagatgatgaattaagccggcaggcacctattggaggcgactttccagcagttcagaagcagaacgatgtacatagggccttcaagagggaattgaaaactaaagaacctgtaatcatgagtactcttgagactgtacgaatatttctgacagagcagcctttggaaggactagagaaactctaccaggagcccagagagctgcctcctgaggagagagcccagaatgtcactcggcttctacgaaagcaggctgaggaggtcaatactgagtgggaaaaattgaacctgcactccgctgactggcagagaaaaatagatgagacccttgaaagactccgggaacttcaagaggccacggatgagctggacctcaagctgcgccaagctgaggtgatcaagggatcctggcagcccgtgggcgatctcctcattgactctctccaagatcacctcgagaaagtcaaggcacttcgaggagaaattgcgcctctgaaagagaacgtgagccacgtcaatgaccttgctcgccagcttaccactttgggcattcagctctcaccgtataacctcagcactctggaagacctgaacaccagatggaagcttctgcaggtggccgtcgaggaccgagtcaggcagctgcatgaagcccacagggactttggtccagcatctcagcactttctttccacgtctgtccagggtccctgggagagagccatctcgccaaacaaagtgccctactatatcaaccacgagactcaaacaacttgctgggaccatcccaaaatgacagagctctaccagtctttagctgacctgaataatgtcagattctcagcttataggactgccatgaaactccgaagactgcagaaggccctttgcttggatctcttgagcctgtcagctgcatgtgatgccttggaccagcacaacctcaagcaaaatgaccagcccatggatatcctgcagattattaattgtttgaccactatttatgaccgcctggagcaagagcacaacaatttggtcaacgtccctctctgcgtggatatgtgtctgaactggctgctgaatgtttatgatacgggacgaacagggaggatccgtgtcctgtcttttaaaactggcatcatttccctgtgtaaagcacatttggaagacaagtacagataccttttcaagcaagtggcaagttcaacaggattttgtgaccagcgcaggctgggcctccttctgcatgattctatccaaattccaagacagttgggtgaagttgcatcctttgggggcagtaacattgagccaagtgtccggagctgcttccaatttgctaataataagccagagatcgaagcggccctcttcctagactggatgagactggaaccccagtccatggtgtggctgcccgtcctgcacagagtggctgctgcagaaactgccaagcatcaggccaaatgtaacatctgcaaagagtgtccaatcattggattcaggtacaggagtctaaagcactttaattatgacatctgccaaagctgctttttttctggtcgagttgcaaaaggccataaaatgcactatcccatggtggaatattgcactccgactacatcaggagaagatgttcgagactttgccaaggtactaaaaaacaaatttcgaaccaaaaggtattttgcgaagcatccccgaatgggctacctgccagtgcagactgtcttagagggggacaacatggaaactcccgttactctgatcaacttctggccagtagattctgcgcctgcctcgtcccctcagctttcacacgatgatactcattcacgcattgaacattatgctagcaggctagcagaaatggaaaacagcaatggatcttatctaaatgatagcatctctcctaatgagagcatagatgatgaacatttgttaatccagcattactgccaaagtttgaaccaggactcccccctgagccagcctcgtagtcctgcccagatcttgatttccttagagagtgaggaaagaggggagctagagagaatcctagcagatcttgaggaagaaaacaggaatctgcaagcagaatatgaccgtctaaagcagcagcacgaacataaaggcctgtccccactgccgtcccctcctgaaatgatgcccacctctccccagagtccccgggatgctgagctcattgctgaggccaagctactgcgtcaacacaaaggccgcctggaagccaggatgcaaatcctggaagaccacaataaacagctggagtcacagttacacaggctaaggcagctgctggagcaaccccaggcagaggccaaagtgaatggcacaacggtgtcctctccttctacctctctacagaggtccgacagcagtcagcctatgctgctccgagtggttggcagtcaaacttcggactccatgggtgaggaagatcttctcagtcctccccaggacacaagcacagggttagaggaggtgatggagcaactcaacaactccttccctagttcaagaggaagaaatacccctggaaagccaatgagagaggacacaatgtag

SEQ ID NO: 660 - DNA, 3459 bp, Homo sapiens
  source 1..3459: mol_type = genomic DNA
atgagggagccggaagagctgatgcccgattcgggtgctgtgtttacatttgggaaaagtaaatttgctgaaaataatcccggtaaattctggtttaaaaatgatgtccctgtacatctttcatgtggagatgaacattctgctgttgttaccggaaataataaactttacatgtttggcagtaacaactggggtcagttaggattaggatcaaagtcagccatcagcaagccaacatgtgtcaaagctctaaaacctgaaaaagtgaaattagctgcctgtggaaggaaccacaccctggtgtcaacagaaggaggcaatgtatatgcaactggtggaaataatgaaggacagttggggcttggtgacaccgaagaaagaaacacttttcatgtaattagcttttttacatccgagcataagattaagcagctgtctgctggatctaatacttcagctgccctaactgaggatggaagactttttatgtggggtgacaattccgaagggcaaattggtttaaaaaatgtaagtaatgtctgtgtccctcagcaagtgaccattgggaaacctgtctcctggatctcttgtggatattaccattcagcttttgtaacaacagatggtgagctatatgtgtttggagaacctgagaatgggaagttaggtcttcccaatcagctcctgggcaatcacagaacaccccagctggtgtctgaaattccggagaaggtgatccaagtagcctgtggtggagagcatactgtggttctcacggagaatgctgtgtatacctttgggctgggacaatttggtcagctgggtcttggcacttttctttttgaaacttcagaacccaaagtcattgagaatattagggatcaaacaataagttatatttcttgtggagaaaatcacacagctttgataacagatatcggccttatgtatacttttggagatggtcgccacggaaaattaggacttggactggagaattttaccaatcacttcattcctactttgtgctctaattttttgaggtttatagttaaattggttgcttgtggtggatgtcacatggtagtttttgctgctcctcatcgtggtgtggcaaaagaaattgaattcgatgaaataaatgatacttgcttatctgtggcgacttttctgccgtatagcagtttaacctcaggaaatgtactgcagaggactctatcagcacgtatgcggcgaagagagagggagaggtctccagattctttttcaatgaggagaacactacctccaatagaagggactcttggcctttctgcttgttttctccccaattcagtctttccacgatgttctgagagaaacctccaagagagtgtcttatctgaacaggacctcatgcagccagaggaaccagattatttgctagatgaaatgaccaaagaagcagagatagataattcttcaactgtagaaagccttggagaaactactgatatcttaaacatgacacacatcatgagcctgaattccaatgaaaagtcattaaaattatcaccagttcagaaacaaaagaaacaacaaacaattggggaactgacgcaggatacagctcttactgaaaacgatgatagtgatgaatatgaagaaatgtcagaaatgaaagaagggaaagcatgtaaacaacatgtgtcacaagggattttcatgacgcagccagctacgactatcgaagcattttcagatgaggaagtagagatcccagaggagaaggaaggagcagaggattcaaaaggaaatggaatagaggagcaagaggtagaagcaaatgaggaaaatgtgaaggtgcatggaggaagaaaggagaaaacagagatcctatcagatgaccttacagacaaagcagaggtgagtgaaggcaaggcaaaatcagtgggagaagcagaggatgggcctgaaggtagaggggatggaacctgtgaggaaggtagttcaggagcagaacactggcaagatgaggagagggagaagggggagaaagacaagggtagaggagaaatggagaggccaggagagggagagaaggaactagcagagaaggaagaatggaagaagagggatggggaagagcaggagcaaaaggagagggagcagggccatcagaaggaaagaaaccaagagatggaggagggaggggaggaggagcatggagaaggagaagaagaggagggagacagagaagaggaagaagagaaggagggagaagggaaagaggaaggagaaggggaagaagtggagggagaacgtgaaaaggaggaaggagagaggaaaaaggaggaaagagcggggaaggaggagaaaggagaggaagaaggagaccaaggagagggggaagaggaggaaacagaggggagaggggaggaaaaagaggagggaggggaagtagagggaggggaagtagaggaggggaaaggagagagggaagaggaagaggaggagggtgagggggaagaggaggaaggggagggggaagaggaggaaggggagggggaagaggaggaaggagaagggaaaggggaggaagaaggggaagaaggagaaggggaggaagaaggggaggaaggagaaggggagggggaagaggaggaaggagaaggggagggagaagaggaaggagaaggggagggagaagaggaggaaggagaaggggagggagaagaggaaggagaaggggagggagaagaggaggaaggagaagggaaaggggaggaggaaggagaggaaggagaaggggagggggaagaggaggaaggagaaggggaaggggaggatggagaaggggagggggaagaggaggaaggagaatgggagggggaagaggaggaaggagaaggggagggggaagaggaaggagaaggggaaggggaggaaggagaaggggagggggaagaggaggaaggagaaggggagggggaagaggaggaaggggaagaagaaggggaggaagaaggagagggagaggaagaaggggagggagaaggggaggaagaagaggaaggggaagtggaaggggaggtggaaggggaggaaggagagggggaaggagaggaagaggaaggagaggaggaaggagaagaaagggaaaaggagggggaaggagaagaaaacaggaggaacagagaagaggaggaggaagaagaggggaagtatcaggagacaggcgaagaagagaatgaaaggcaggatggagaggagtacaaaaaagtgagcaaaataaaaggatctgtgaaatatggcaaacataaaacatatcaaaaaaagtcagttactaacacacagggaaatgggaaagagcagaggtccaaaatgccagtccagtcaaaacgacttttaaaaaacgggccatcaggttccaaaaagttctggaataatgtattaccacattacttggaattgaagtaa

SEQ ID NO: 661 - DNA, 1431 bp, Homo sapiens
  source 1..1431: mol_type = genomic DNA
atgttggtcctgcttctgcatgcggtggtcctcggcctgcccagcgcctgggccgtgggggcctgcgcccgcgcttgtcccgccgcctgcgcctgcagcaccgtggagcgcggctgctcggtgcgctgcgaccgcgcgggcctcctgcgggtgccggccgagctcccgtgcgaggcggtctccatcgacctggaccggaacggcctgcgcttcctgggcgagcgagccttcggcacgctgccgtccttgcgccgcctgtcgctgcgccacaacaacctgtccttcatcacgcccggcgccttcaagggcctgccgcgcctggctgagctgcgcctggcgcacaacggcgacctgcgctacctgcacgcgcgcaccttcgcggcgctcagccgcctgcgccgcctagacctagcagcctgccgcctcttcagcgtgcccgagcgcctcctggccgaactgccggccctgcgcgaactcgccgccttcgacaacctgttccgccgcgtgccgggcgcgctgcgcggcctggccaacctgacgcacgcgcacctggagcgcggccgcatcgaggcggtggcctccagctcgctgcagggcctgcgccgcctgcgctcgctcagcctgcaggccaaccgcgtccgtgccgtgcacgctggcgccttcggggactgtggcgtcctggagcatctgctgctcaacgacaacctgctggccgagctcccggccgacgccttccgcggcctgcggcgcctgcgcacgctcaacctgggtggcaacgcgctggaccgcgtggcgcgcgcctggttcgctgacctggccgagctcgagctgctctacctggaccgcaacagcatcgccttcgtggaggagggcgccttccagaacctctcgggtctcctcgcgctgcacctcaacggcaaccgcctcaccgtgctcgcctgggtcgccttccagcccggcttcttcctgggccgcctcttcctcttccgcaacccgtggtgctgcgactgccgtctggagtggctgagggactggatggagggctccggacgtgtcaccgacgtgccgtgcgcctccccgggctccgtggccggcctggacctcagccaggtgaccttcgggcgctcctccgatggcctctgtgtggaccccgaggagctgaacctcaccacgtccagtccaggcccgtccccagaaccagcggccaccaccgtgagcaggttcagcagcctcctctccaagctgctggccccgagggtcccggtggaggaggcggccaacaccactggggggctggccaacgcctccctgtccgacagcctctcctcccgtggggtgggaggcgcgggccggcagccctggtttctcctcgcctcttgtctcctgcccagcgtggcccagcacgtggtgtttggcctgcagatggactga

SEQ ID NO: 662 - DNA, 1482 bp, Homo sapiens
  source 1..1482: mol_type = genomic DNA
atggcggcggccaccggaccctcgttttggctggggaatgaaaccctgaaggtgccgctggcgctctttgccttgaaccggcagcgcctgtgtgagcggctgcggaagaaccctgctgtgcaggccggctccatcgtggtcctgcagggcggggaggagactcagcgctactgcaccgacaccggggtcctcttccgccaggagtccttctttcactgggcgttcggtgtcactgagccaggctgctatggtgtcatcgatgttgacactgggaagtcgaccctgtttgtgcccaggcttcctgccagccatgccacctggatgggaaagatccattccaaggagcacttcaaggagaagtatgccgtggacgacgtccagtacgtagatgagattgccagcgtcctgacgtcacagaagccctctgtcctcctcactttgcgtggcgtcaacacggacagcggcagtgtctgcagggaggcctcctttgacggcatcagcaagttcgaagtcaacaataccattcttcacccagagatcgttgagtgccgagtgtttaagacggatatggagctggaggttctgcgctataccaataaaatctccagcgaggcccaccgtgaggtaatgaaggctgtaaaagtgggaatgaaagaatatgagttggaaagcctcttcgagcactactgctactcccggggcggcatgcgccacagctcctacacctgcatctgcggcagtggtgagaactcagccgtgctacactacggacacgccggagctcccaacgaccgaacgatccagaatggggatatgtgcctgttcgacatgggcggtgagtattactgcttcgcttccgacatcacctgctcctttcccgccaacggcaagttcactgcagaccagaaggccgtctatgaggcagtgctgcggagctcccgtgccgtcatgggtgccatgaagccaggtgtctggtggcctgacatgcaccgcctggctgaccgcatccacctggaggagctggcccacatgggcatcctgagcggcagcgtggacgccatggtccaggctcacctgggggccgtgtttatgcctcacgggcttggccacttcctgggcattgacgtgcacgacgtgggaggctacccagagggcgtggagcgcatcgacgagcccggcctgcggagcctgcgcactgcacggcacctgcagccaggcatggtgctcaccgtggagccgggcatctacttcatcgaccacctcctggatgaggccctggcggacccggcccgcgcctccttccttaaccgcgaggtcctgcagcgctttcgcggttttggcggggtccgcatcgaggaggacgtcgtggtgactgacagcggcatagagctgctgacctgcgtgccccgcactgtggaagagattgaagcatgcatggcaggctgtgacaaggcctttacccccttctctggccccaagtag

SEQ ID NO: 663 - DNA, 402 bp, Homo sapiens
  source 1..402: mol_type = genomic DNA
atgagaaaacatgtactagctgcatccttttctatgctctccctgctggtgataatgggagatacagacagtaaaacggacagctcattcataatggactcggaccctcgacgctgcatgaggcaccactatgtggattctatcagtcacccattgtacaagtgtagctcaaagatggtgctcctggccaggtgcgaggggcactgcagccaggcgtcacgctccgagcctttggtgtcgttcagcactgtcctcaagcaacccttccgttcctcctgtcactgctgccggccccagacttccaagctgaaggcactgcggctgcgatgctcagggggcatgcgactcactgccacctaccggtacatcctctcctgtcactgcgaggaatgcaattcctga

SEQ ID NO: 664 - DNA, 5934 bp, Homo sapiens
  source 1..5934: mol_type = genomic DNA
atgtcggaatctgaaggcgggaaagacaccaccccagagcccagtccagccaatggggcaggccctggtcccgaatgggggctgtgccccgggcccccagctgtggaaggtgaaagcagtggggcatcaggcctagggacccctaagcgaagaaaccagcacagcaagcacaagacagtggcagtggccagtgcccagcggtcacctcgggcactcttctgcctcaccctggccaatcctctgcgacggtcctgcatcagcatcgtggagtggaagcccttcgacatcctcatcctgctgaccatctttgccaactgcgtggccctgggagtttacatccccttccctgaggacgactccaacactgccaaccacaacctggagcaggtggagtacgtattcctggtgattttcactgtggagacggtgctcaagatcgtggcctacgggctggtgctccaccccagcgcctacatccgcaatggctggaacctactcgacttcatcatcgtcgtggtcgggctgttcagcgttctgctggagcagggccccggacggccaggcgacgccccgcacaccgggggaaagccaggaggcttcgatgtgaaggcattgagggcgtttcgggtgctgcggccactgaggctggtgtctggggtcccgagcctgcacatagtgctcaattccatcatgaaggctctggtgccgctgctgcacattgcactgctcgtgctcttcgtcatcatcatttatgccatcattgggctcgagctgttccttggacgaatgcacaagacgtgctacttcctgggatccgacatggaagcggaggaggacccatcgccctgtgcgtcttcgggatcagggcgtgcgtgcacgctgaaccagactgagtgccgcgggcgctggccagggcccaatggaggcatcaccaactttgacaacttcttcttcgccatgctgacagtcttccagtgtgtcaccatggaaggctggaccgatgtgctctactggatgcaagatgccatggggtatgaactgccctgggtgtactttgtgagccttgtcatctttgggtccttcttcgtcctcaaccttgtgcttggcgtcctgagtggggagttctccaaggagagagagaaagcgaaagctcgcggggacttccagaagcagcgggagaagcagcagatggaggaagacctgcggggctacctggactggatcactcaagccgaagagctggacatggaggacccctccgccgatgacaaccttggttctatggctgaagagggccgggcgggccatcggccacagctggccgagctgaccaataggaggcgtggacgtctgcgctggttcagtcattctactcgctccacacactccaccagcagccatgccagcctcccagccagtgacaccggttccatgacagagacccaaggcgatgaggatgaggaggagggggctctggccagctgtacacgctgcctaaacaagatcatgaaaaccagagtctgccgccgcctccgccgagccaaccgggtccttcgggcacgctgccgtcgggcagtgaagtccaatgcctgctactgggctgtgctgttgctcgtcttcctcaacacgttgaccatcgcctctgagcaccacgggcagcctgtgtggctcacccagatccaggagtatgccaacaaagtgttgctctgtctgttcacggtggagatgcttctcaaattgtacggtctgggcccctctgcctatgtgtcttccttcttcaaccgctttgactgctttgtggtctgtgggggcatcctagagaccaccttggtggaggtgggtgccatgcagcccttgggcatctcagtgctccgatgtgtgcgcctcctcaggatctttaaggtcaccagacactgggcttctctgagcaatctggtggcatccctgctcaattcaatgaaatccatcgcatccttgctgcttctcctcttcctcttcatcattatcttctccctgcttggcatgcagctgtttgggggcaagttcaactttgaccagacccacaccaagcgaagcacctttgacacgttcccccaggccctcctcactgtctttcagatcctgacaggtgaggactggaacgtggtcatgtatgatggtatcatggcatatggtggccccttcttcccaggaatgttggtgtgcatctatttcatcattctcttcatctgtggcaactacatcctgttgaacgtgtttcttgccattgctgtggacaacctggccagtggagatgcaggcactgccaaggacaagggcggggagaagagcaatgagaaggatctcccacaggagaatgaaggcctggtgcctggtgtggagaaagaggaagaggagggtgcaaggagggaaggagcagacatggaggaggaggaggaggaggaagaagaggaagaagaggaagaagaggaagagggtgcagggggtgtggaactcctgcaggaagttgtacccaaggagaaggtggtacccatccctgagggcagcgccttcttctgcctcagccaaaccaacccgctgaggaagggctgccacaccctcatccaccatcatgtcttcaccaatcttatcctggtgttcatcatcctcagcagtgtgtccctggccgctgaggaccccatccgagcccactccttccgcaaccatattctgggttacttcgattatgccttcacctccattttcactgtggagattctactaaagatgacagtgtttggggccttcctgcaccgcggctccttctgccgtagctggtttaatatgttggatctgctggtggtcagtgtgtccctcatctcctttggcatccactccagcgccatctcggtggtgaagattctgcgagtactccgagtactgcggcccctccgagccatcaacagggccaagggactcaagcatgtggtgcagtgtgtatttgtggccatccggaccatcggaaacatcatgattgtcaccacacttctgcaatttatgttcgcctgcatcggggtgcagctcttcaaggggaaattctacacctgcacggacgaggccaaacacacccctcaagaatgcaagggctccttcctggtatacccagatggagacgtgtcacggcccctggtccgggagcggctctgggtcaacagtgatttcaactttgacaatgtcctttcagccatgatggccctgttcactgtctccacctttgaaggctggcctgcactgctatacaaggccatcgatgcatatgcagaggaccacggccccatctataattaccgtgtggagatctcagtgttcttcattgtctacatcatcatcattgcgttcttcatgatgaacatcttcgtgggcttcgtcatcatcactttccgtgcccagggcgagcaggagtaccaaaactgtgagctggacaagaaccagcgtcaatgtgtggaatatgccctcaaggcccagccactccgccgttacatccccaagaacccgcatcagtatcgtgtgtgggccactgtgaactctgctgcctttgagtacctgatgttcctgctcatcctgctcaacacagttgccctagccatgcagcactatgagcagactgctcccttcaactatgccatggacatcctcaacatggtcttcactggcctcttcactattgagatggtgctcaaaatcatcgccttcaagcccaagcattacttcactgatgcctggaacacgtttgacgctcttattgtggtgggcagcatagtggatattgccgtcactgaagtcaataatggtggccaccttggcgagagctctgaggacagctcccgcatttccattaccttctttcgcctcttccgagttatgcggctggtcaagcttctcagtaagggtgaagggatccgcacattgctctggacattcatcaagtccttccaggccttgccctatgtggctcttctcatcgcaatgatattcttcatctatgccgtcattggcatgcagatgttcggcaaggtggctcttcaggatggcacacagataaaccgaaacaacaacttccagacctttccacaggctgtgctgcttctgttcaggtgtgccactggtgaggcatggcaggagataatgcttgccagccttcccggaaatcggtgtgatcctgagtctgacttcggccctggtgaagagtttacctgtggtagcaattttgccatcgcctatttcatcagcttcttcatgctctgtgccttcctgatcataaatctctttgtggctgtgatcatggacaactttgattatctcaccagagattggtccatcctgggcccccatcaccttgatgaattcaagaggatctggtctgaatatgaccctggggccaagggccgcatcaaacacttggatgtggttgccctgctgagacgtatccagccccctctgggatttgggaagctgtgcccacaccgagtggcctgcaagagacttgtggcaatgaacatgcccctcaactcagatgggacggtgacattcaacgccacactctttgccctggtccggacatccctgaagatcaaaacagaagggaacctggagcaagccaaccaggagctgcggattgtcatcaaaaagatctggaagcggatgaaacagaagctgctagatgaggtcatccccccaccagacgaggaggaggtcaccgtgggcaaattctacgccacatttctgatccaggactatttccgcaaattccggcggaggaaagaaaaagggctactaggcaacgacgccgcccctagcacctcttccgcccttcaggctggtctgcggagcctgcaggacttgggtcctgagatgcggcaggccctcacctgtgacacagaggaggaggaagaagaggggcaggagggagtggaggaggaagatgaaaaggacttggaaactaacaaagccacgatggtctcccagccctcagctcgccggggctccgggatttctgtgtctctgcctgtcggggacagacttccagattcactctcctttgggcccagtgatgatgacagggggactcccacctccagtcagcccagtgtgccccaggctggatccaacacccacaggagaggctctggggctctcattttcaccatcccagaagaaggaaattctcagcccaagggaaccaaagggcaaaacaagcaagatgaggatgaggaagtccctgatcggctttcctacctagatgagcaggcagggactcccccgtgctcagtccttttgccacctcacagagctcagagatacatggatgggcacctggtaccacgccgccgtctgctgccccccacacctgcaggtcggaagccctccttcaccatccagtgtctgcagcgccagggcagttgtgaggatttacccatcccaggcacctatcatcgtgggcgaaattcagggcccaatagggctcagggttcctgggcaacaccacctcagcggggtcggctcctgtatgccccgctgttgttggtggaagagggcgcagcgggggaggggtacctcggcagatccagtggcccactgcgcaccttcacctgtctgcacgtgcctggaacccactcggaccccagccatgggaagaggggcagtgccgacagcttggtggaggctgtgcttatctcagagggtctgggcctctttgctcgagacccacgtttcgtggccctggccaagcaggagattgcagatgcgtgtcgcctgacgctggatgagatggacaatgctgccagtgacctgctggcacagggaaccagctctctctatagcgacgaggagtccatcctctcccgcttcgatgaggaggacttgggagacgagatggcctgcgtccacgccctctga

SEQ ID NO: 665 - DNA, 1254 bp, Homo sapiens
  source 1..1254: mol_type = genomic DNA
atgtcgctttctaacaagctgacgctggacaagctggacgttaaagggaagcgggtcgttatgagagtcgacttcaatgttcctatgaagaacaaccagataacaaacaaccagaggattaaggctgctgtcccaagcatcaaattctgcttggacaatggagccaagtcggtagtccttatgagccacctaggccggcctgatggtgtgcccatgcctgacaagtactccttagagccagttgctgtagaactcaaatctctgctgggcaaggatgttctgttcttgaaggactgtgtaggcccagaagtggagaaagcctgtgccaacccagctgctgggtctgtcatcctgctggagaacctccgctttcatgtggaggaagaagggaagggaaaagatgcttctgggaacaaggttaaagccgagccagccaaaatagaagctttccgagcttcactttccaagctaggggatgtctatgtcaatgatgcttttggcactgctcacagagcccacagctccatggtaggagtcaatctgccacagaaggctggtgggtttttgatgaagaaggagctgaactactttgcaaaggccttggagagcccagagcgacccttcctggccatcctgggcggagctaaagttgcagacaagatccagctcatcaataatatgctggacaaagtcaatgagatgattattggtggtggaatggcttttaccttccttaaggtgctcaacaacatggagattggcacttctctgtttgatgaagagggagccaagattgtcaaagacctaatgtccaaagctgagaagaatggtgtgaagattaccttgcctgttgactttgtcactgctgacaagtttgatgagaatgccaagactggccaagccactgtggcttctggcatacctgctggctggatgggcttggactgtggtcctgaaagcagcaagaagtatgctgaggctgtcactcgggctaagcagattgtgtggaatggtcctgtgggggtatttgaatgggaagcttttgcccggggaaccaaagctctcatggatgaggtggtgaaagccacttctaggggctgcatcaccatcataggtggtggagacactgccacttgctgtgccaaatggaacacggaggataaagtcagccatgtgagcactgggggtggtgccagtttggagctcctggaaggtaaagtccttcctggggtggatgctctcagcaatatttag

SEQ ID NO: 666 - DNA, 1962 bp, Homo sapiens
  source 1..1962: mol_type = genomic DNA
atggcggatactctcccttcggagtttgatgtgatcgtaatagggacgggtttgcctgaatccatcattgcagctgcatgttcaagaagtggccggagagttctgcatgttgattcaagaagctactatggaggaaactgggccagttttagcttttcaggactattgtcctggctaaaggaataccaggaaaacagtgacattgtaagtgacagtccagtgtggcaagaccagatccttgaaaatgaagaagccattgctcttagcaggaaggacaaaactattcaacatgtggaagtattttgttatgccagtcaggatttgcatgaagatgtcgaagaagctggtgcactgcagaaaaatcatgctcttgtgacatctgcaaactccacagaagctgcagattctgccttcctgcctacggaggatgagtcattaagcactatgagctgtgaaatgctcacagaacaaactccaagcagcgatccagagaatgcgctagaagtaaatggtgctgaagtgacaggggaaaaagaaaaccattgtgatgataaaacttgtgtgccatcaacttcagcagaagacatgagtgaaaatgtgcctatagcagaagataccacagagcaaccaaagaaaaacagaattacttactcacaaattattaaagaaggcaggagatttaatattgatttagtatcaaagctgctgtattctcgaggattactaattgatcttctaatcaaatctaatgttagtcgatatgcagagtttaaaaatattaccaggattcttgcatttcgagaaggacgagtggaacaggttccgtgttccagagcagatgtctttaatagcaaacaacttactatggtagaaaagcgaatgctaatgaaatttcttacattttgtatggaatatgagaaatatcctgatgaatataaaggatatgaagagatcacattttatgaatatttaaagactcaaaaattaacccccaacctccaatatattgtcatgcattcaattgcaatgacatcagagacagccagcagcaccatagatggtctcaaagctaccaaaaactttcttcactgtcttgggcggtatggcaacactccatttttgtttcctttatatggccaaggagaactcccccagtgtttctgcaggatgtgtgctgtgtttggtggaatttattgtcttcgccattcagtacagtgccttgtagtggacaaagaatccagaaaatgtaaagcaattatagatcagtttggtcagagaataatctctgagcatttcctcgtggaggacagttactttcctgagaacatgtgctcacgtgtgcaatacaggcagatctccagggcagtgctgattacagatagatctgtcctaaaaacagattcagatcaacagatttccattttgacagtgccagcagaggaaccaggaacttttgctgttcgggtcattgagttatgttcttcaacgatgacatgcatgaaaggcacctatttggttcatttgacttgcacatcttctaaaacagcaagagaagatttagaatcagttgtgcagaaattgtttgttccatatactgaaatggagatagaaaatgaacaagtagaaaagccaagaattctgtgggctctttacttcaatatgagagattcgtcagacatcagcaggagctgttataatgatttaccatccaacgtttatgtctgctctggcccagattgtggtttaggaaatgataatgcagtcaaacaggctgaaacacttttccaggaaatctgccccaatgaagatttctgtccccctccaccaaatcctgaagacattatccttgatggagacagtttacagccagaggcttcagaatccagtgccataccagaggctaactcggagactttcaaggaaagcacaaaccttggaaacctagaggagtcctctgaataa

SEQ ID NO: 667 - DNA, 294 bp, Homo sapiens
  source 1..294: mol_type = genomic DNA
atggattcctcctcctcttcctccgcggcgggtttgggtgcagtggacccgcagttgcagcatttcatcgaggtagagactcaaaagcagcgcttccagcagctggtgcaccagatgactgaactttgttgggagaagtgcatggacaagcctgggccaaagttggacagtcgggctgaggcctgttttgtgaactgcgttgagcgcttcattgatacaagccagttcatcttgaatcgactggaacagacccagaaatccaagccagttttctcagaaagcctttctgactga

SEQ ID NO: 668 - DNA, 957 bp, Homo sapiens
  source 1..957: mol_type = genomic DNA
atgccgaatatcaaaatcttcagcggcagctcccaccaggacttatctcagaaaattgctgaccgcctgggcctggagctaggcaaggtggtgactaagaaattcagcaaccaggagacctgtgtggaaattggtgaaagtgtacgtggagaggatgtctacattgttcagagtggttgtggcgaaatcaatgacaatttaatggagcttttgatcatgattaatgcctgcaagattgcttcagccagccgggttactgcagtcatcccatgcttcccttatgcccggcaggataagaaagataagagccgggcgccaatctcagccaagcttgttgcaaatatgctatctgtagcaggtgcagatcatattatcaccatggacctacatgcttctcaaattcagggcttttttgatatcccagtagacaatttgtatgcagagccggctgtcctaaagtggataagggagaatatctctgagtggaggaactgcactattgtctcacctgatgctggtggagctaagagagtgacctccattgcagacaggctgaatgtggactttgccttgattcacaaagaacggaagaaggccaatgaagtggaccgcatggtgcttgtgggagatgtgaaggatcgggtggccatccttgtggatgacatggctgacacttgtggcacaatctgccatgcagctgacaaacttctctcagctggcgccaccagagtttatgccatcttgactcatggaatcttctccggtcctgctatttctcgcatcaacaacgcatgctttgaggcagtagtagtcaccaataccatacctcaggaggacaagatgaagcattgctccaaaatacaggtgattgacatctctatgatccttgcagaagccatcaggagaactcacaatggagaatccgtttcttacctattcagccatgtccctttataa

SEQ ID NO: 669 - DNA, 1095 bp, Homo sapiens
  source 1..1095: mol_type = genomic DNA
atggcccagcagtggagcctccaaaggctcgcaggccgccatccgcaggacagctatgaggacagcacccagtccagcatcttcacctacaccaacagcaactccaccagaggccccttcgaaggcccgaattaccacatcgctcccagatgggtgtaccacctcaccagtgtctggatgatctttgtggtcactgcatccgtcttcacaaatgggcttgtgctggcggccaccatgaagttcaagaagctgcgccacccgctgaactggatcctggtgaacctggcggtcgctgacctagcagagaccgtcatcgccagcactatcagcattgtgaaccaggtctctggctacttcgtgctgggccaccctatgtgtgtcctggagggctacaccgtctccctgtgtgggatcacaggtctctggtctctggccatcatttcctgggagagatggatggtggtctgcaagccctttggcaatgtgagatttgatgccaagctggccatcgtgggcattgccttctcctggatctgggctgctgtgtggacagccccgcccatctttggttggagcaggtactggccccacggcctgaagacttcatgcggcccagacgtgttcagcggcagctcgtaccccggggtgcagtcttacatgattgtcctcatggtcacctgctgcatcatcccactcgctatcatcatgctctgctacctccaagtgtggctggccatccgagcggtggcaaagcagcagaaagagtctgaatccacccagaaggcagagaaggaagtgacgcgcatggtggtggtgatgatctttgcgtactgcgtctgctggggaccctacaccttcttcgcatgctttgctgctgccaaccctggttacgccttccaccctttgatggctgccctgccggcctactttgccaaaagtgccactatctacaaccccgttatctatgtctttatgaaccggcagtttcgaaactgcatcttgcagcttttcgggaagaaggttgacgatggctctgaactctccagcgcctccaaaacggaggtctcatctgtgtcctcggtatcgcctgcatga

SEQ ID NO: 670 - DNA, 1095 bp, Homo sapiens
  source 1..1095: mol_type = genomic DNA
atggcccagcagtggagcctccaaaggctcgcaggccgccatccgcaggacagctatgaggacagcacccagtccagcatcttcacctacaccaacagcaactccaccagaggccccttcgaaggcccgaattaccacatcgctcccagatgggtgtaccacctcaccagtgtctggatgatctttgtggtcattgcatccgtcttcacaaatgggcttgtgctggcggccaccatgaagttcaagaagctgcgccacccgctgaactggatcctggtgaacctggcggtcgctgacctggcagagaccgtcatcgccagcactatcagcgttgtgaaccaggtctatggctacttcgtgctgggccaccctatgtgtgtcctggagggctacaccgtctccctgtgtgggatcacaggtctctggtctctggccatcatttcctgggagagatggatggtggtctgcaagccctttggcaatgtgagatttgatgccaagctggccatcgtgggcattgccttctcctggatctgggctgctgtgtggacagccccgcccatctttggttggagcaggtactggccccacggcctgaagacttcatgcggcccagacgtgttcagcggcagctcgtaccccggggtgcagtcttacatgattgtcctcatggtcacctgctgcatcaccccactcagcatcatcgtgctctgctacctccaagtgtggctggccatccgagcggtggcaaagcagcagaaagagtctgaatccacccagaaggcagagaaggaagtgacgcgcatggtggtggtgatggtcctggcattctgcttctgctggggaccatacgccttcttcgcatgctttgctgctgccaaccctggctaccccttccaccctttgatggctgccctgccggccttctttgccaaaagtgccactatctacaaccccgttatctatgtctttatgaaccggcagtttcgaaactgcatcttgcagcttttcgggaagaaggttgacgatggctctgaactctccagcgcctccaaaacggaggtctcatctgtgtcctcggtatcgcctgcatga

SEQ ID NO: 671 - DNA, 1038 bp, Homo sapiens; identical to SEQ ID NO: 502
  source 1..1038: mol_type = genomic DNA

SEQ ID NO: 672 - DNA, 741 bp, Homo sapiens
  source 1..741: mol_type = genomic DNA
atggcgtttctccgaagcatgtggggcgtgctgagtgccctgggaaggtctggagcagagctgtgcaccggctgtggaagtcgactgcgctcccccttcagttttgtgtatttaccgaggtggttttcatctgtcttggcaagttgtccaaagaaacctgtaagttcttaccttcgattttctaaagaacaactacccatatttaaagctcagaacccagatgcaaaaactacagaactaattagaagaattgcccagcgttggagggaacttcctgattcaaagaaaaaaatatatcaagatgcttatagggcggagtggcaggtatataaagaagagataagcagatttaaagaacagctaactccaagtcagattatgtctttggaaaaagaaatcatggacaaacatttaaaaaggaaagctatgacaaaaaaaaaagagttaacactgcttggaaaaccaaaaagacctcgttcagcttataacgtttatgtagctgaaagattccaagaagctaagggtgattcaccgcaggaaaagctgaagactgtaaaggaaaactggaaaaatctgtctgactctgaaaaggaattatatattcagcatgctaaagaggacgaaactcgttatcataatgaaatgaagtcttgggaagaacaaatgattgaagttggacgaaaggatcttctacgtcgcacaataaagaaacaacgaaaatatggtgctgaggagtgttaa

SEQ ID NO: 673 - DNA, 956 bp, Homo sapiens
  source 1..956: mol_type = genomic DNA
atacccatggccaacctcctactcctcattgtacccattctaatcgcaatggcattcctaatgcttaccgaacgaaaaattctaggctatatacaactacgcaaaggccccaacgttgtaggcccctacgggctactacaacccttcgctgacgccataaaactcttcaccaaagagcccctaaaacccgccacatctaccatcaccctctacatcaccgccccgaccttagctctcaccatcgctcttctactatgaacccccctccccatacccaaccccctggtcaacctcaacctaggcctcctatttattctagccacctctagcctagccgtttactcaatcctctgatcagggtgagcatcaaactcaaactacgccctgatcggcgcactgcgagcagtagcccaaacaatctcatatgaagtcaccctagccatcattctactatcaacattactaataagtggctcctttaacctctccacccttatcacaacacaagaacacctctgattactcctgccatcatgacccttggccataatatgatttatctccacactagcagagaccaaccgaacccccttcgaccttgccgaaggggagtccgaactagtctcaggcttcaacatcgaatacgccgcaggccccttcgccctattcttcatagccgaatacacaaacattattataataaacaccctcaccactacaatcttcctaggaacaacatatgacgcactctcccctgaactctacacaacatattttgtcaccaagaccctacttctaacctccctgttcttatgaattcgaacagcatacccccgattccgctacgaccaactcatacacctcctatgaaaaaacttcctaccactcaccctagcattacttatatgatatgtctccatacccattacaatctccagcattccccctcaaaccta

SEQ ID NO: 674 - DNA, 1042 bp, Homo sapiens
  source 1..1042: mol_type = genomic DNA
attaatcccctggcccaacccgtcatctactctaccatctttgcaggcacactcatcacagcgctaagctcgcactgattttttacctgagtaggcctagaaataaacatgctagcttttattccagttctaaccaaaaaaataaaccctcgttccacagaagctgccatcaagtatttcctcacgcaagcaaccgcatccataatccttctaatagctatcctcttcaacaatatactctccggacaatgaaccataaccaatactaccaatcaatactcatcattaataatcataatagctatagcaataaaactaggaatagccccctttcacttctgagtcccagaggttacccaaggcacccctctgacatccggcctgcttcttctcacatgacaaaaactagcccccatctcaatcatataccaaatctctccctcactaaacgtaagccttctcctcactctctcaatcttatccatcatagcaggcagttgaggtggattaaaccaaacccagctacgcaaaatcttagcatactcctcaattacccacataggatgaataatagcagttctaccgtacaaccctaacataaccattcttaatttaactatttatattatcctaactactaccgcattcctactactcaacttaaactccagcaccacgaccctactactatctcgcacctgaaacaagctaacatgactaacacccttaattccatccaccctcctctccctaggaggcctgcccccgctaaccggctttttgcccaaatgggccattatcgaagaattcacaaaaaacaatagcctcatcatccccaccatcatagccaccatcaccctccttaacctctacttctacctacgcctaatctactccacctcaatcacactactccccatatctaacaacgtaaaaataaaatgacagtttgaacatacaaaacccaccccattcctccccacactcatcgcccttaccacgctactcctacctatctccccttttatactaataatcttat

SEQ ID NO: 675 - DNA, 346 bp, Homo sapiens
  source 1..346: mol_type = genomic DNA
ataaacttcgccttaattttaataatcaacaccctcctagccttactactaataattattacattttgactaccacaactcaacggctacatagaaaaatccaccccttacgagtgcggcttcgaccctatatcccccgcccgcgtccctttctccataaaattcttcttagtagctattaccttcttattatttgatctagaaattgccctccttttacccctaccatgagccctacaaacaactaacctgccactaatagttatgtcatccctcttattaatcatcatcctagccctaagtctggcctatgagtgactacaaaaaggattagactgaaccgaat

SEQ ID NO: 676 - DNA, 297 bp, Homo sapiens
  source 1..297: mol_type = genomic DNA
atgcccctcatttacataaatattatactagcatttaccatctcacttctaggaatactagtatatcgctcacacctcatatcctccctactatgcctagaaggaataatactatcgctgttcattatagctactctcataaccctcaacacccactccctcttagccaatattgtgcctattgccatactagtctttgccgcctgcgaagcagcggtgggcctagccctactagtctcaatctccaacacatatggcctagactacgtacataacctaaacctactccaatgctaa

SEQ ID NO: 677 - DNA, 1378 bp, Homo sapiens
  source 1..1378: mol_type = genomic DNA
atgctaaaactaatcgtcccaacaattatattactaccactgacatgactttccaaaaaacacataatttgaatcaacacaaccacccacagcctaattattagcatcatccctctactattttttaaccaaatcaacaacaacctatttagctgttccccaaccttttcctccgaccccctaacaacccccctcctaatactaactacctgactcctacccctcacaatcatggcaagccaacgccacttatccagtgaaccactatcacgaaaaaaactctacctctctatactaatctccctacaaatctccttaattataacattcacagccacagaactaatcatattttatatcttcttcgaaaccacacttatccccaccttggctatcatcacccgatgaggcaaccagccagaacgcctgaacgcaggcacatacttcctattctacaccctagtaggctcccttcccctactcatcgcactaatttacactcacaacaccctaggctcactaaacattctactactcactctcactgcccaagaactatcaaactcctgagccaacaacttaatatgactagcttacacaatagcttttatagtaaagatacctctttacggactccacttatgactccctaaagcccatgtcgaagcccccatcgctgggtcaatagtacttgccgcagtactcttaaaactaggcggctatggtataatacgcctcacactcattctcaaccccctgacaaaacacatagcctaccccttccttgtactatccctatgaggcataattataacaagctccatctgcctacgacaaacagacctaaaatcgctcattgcatactcttcaatcagccacatagccctcgtagtaacagccattctcatccaaaccccctgaagcttcaccggcgcagtcattctcataatcgcccacgggcttacatcctcattactattctgcctagcaaactcaaactacgaacgcactcacagtcgcatcataatcctctctcaaggacttcaaactctactcccactaatagctttttgatgacttctagcaagcctcgctaacctcgccttaccccccactattaacctactgggagaactctctgtgctagtaaccacgttctcctgatcaaatatcactctcctacttacaggactcaacatactagtcacagccctatactccctctacatatttaccacaacacaatggggctcactcacccaccacattaacaacataaaaccctcattcacacgagaaaacaccctcatgttcatacacctatcccccattctcctcctatccctcaaccccgacatcattaccgggttttcctctt

SEQ ID NO: 678 - DNA, 1812 bp, Homo sapiens
  source 1..1812: mol_type = genomic DNA
ataaccatgcacactactataaccaccctaaccctgacttccctaattccccccatccttaccaccctcgttaaccctaacaaaaaaaactcatacccccattatgtaaaatccattgtcgcatccacctttattatcagtctcttccccacaacaatattcatgtgcctagaccaagaagttattatctcgaactgacactgagccacaacccaaacaacccagctctccctaagcttcaaactagactacttctccataatattcatccctgtagcattgttcgttacatggtccatcatagaattctcactgtgatatataaactcagacccaaacattaatcagttcttcaaatatctactcatcttcctaattaccatactaatcttagttaccgctaacaacctattccaactgttcatcggctgagagggcgtaggaattatatccttcttgctcatcagttgatgatacgcccgagcagatgccaacacagcagccattcaagcaatcctatacaaccgtatcggcgatatcggtttcatcctcgccttagcatgatttatcctacactccaactcatgagacccacaacaaatagcccttctaaacgctaatccaagcctcaccccactactaggcctcctcctagcagcagcaggcaaatcagcccaattaggtctccacccctgactcccctcagccatagaaggccccaccccagtctcagccctactccactcaagcactatagttgtagcaggaatcttcttactcatccgcttccaccccctagcagaaaatagcccactaatccaaactctaacactatgcttaggcgctatcaccactctgttcgcagcagtctgcgcccttacacaaaatgacatcaaaaaaatcgtagccttctccacttcaagtcaactaggactcataatagttacaatcggcatcaaccaaccacacctagcattcctgcacatctgtacccacgccttcttcaaagccatactatttatgtgctccgggtccatcatccacaaccttaacaatgaacaagatattcgaaaaataggaggactactcaaaaccatacctctcacttcaacctccctcaccattggcagcctagcattagcaggaatacctttcctcacaggtttctactccaaagaccacatcatcgaaaccgcaaacatatcatacacaaacgcctgagccctatctattactctcatcgctacctccctgacaagcgcctatagcactcgaataattcttctcaccctaacaggtcaacctcgcttccccacccttactaacattaacgaaaataaccccaccctactaaaccccattaaacgcctggcagccggaagcctattcgcaggatttctcattactaacaacatttcccccgcatcccccttccaaacaacaatccccctctacctaaaactcacagccctcgctgtcactttcctaggacttctaacagccctagacctcaactacctaaccaacaaacttaaaataaaatccccactatgcacattttatttctccaacatactcggattctaccctagcatcacacaccgcacaatcccctatctaggccttcttacgagccaaaacctgcccctactcctcctagacctaacctgactagaaaagctattacctaaaacaatttcacagcaccaaatctccacctccatcatcacctcaacccaaaaaggcataattaaactttacttcctctctttcttcttcccactcatcctaaccctactcctaatcacataa

SEQ ID NO: 679 - DNA, 525 bp, Homo sapiens
  source 1..525: mol_type = genomic DNA
atgatgtatgctttgtttctgttgagtgtgggtttagtaatggggtttgtggggttttcttctaagccttctcctatttatgggggtttagtattgattgttagcggtgtggtcgggtgtgttattattctgaattttgggggaggttatatgggtttaatagtttttttaatttatttagggggaatgatggttgtctttggatatactacagcgatggctattgaggagtatcctgaggcatgggggtcaggggttgaggtcttggtgagtgttttagtggggttagcgatggaggtaggattggtgctgtgggtgaaagagtatgatggggtggtggttgtggtaaactttaatagtgtaggaagctgaataatttatgaaggagaggggtcagggttgattcgggaggatcctattggtgcgggggctttgtatgattatgggcgttgattagtagtagttactggttgaacattgtttgttggtgtatatattgtaattgagattgctcgggggaatagg

SEQ ID NO: 680 - DNA, 681 bp, Homo sapiens
  source 1..681: mol_type = genomic DNA
atgaacgaaaatctgttcgcttcattcattgcccccacaatcctaggcctacccgccgcagtactgatcattctatttccccctctattgatccccacctccaaatatctcatcaacaaccgactaatcaccacccaacaatgactaatcaaactaacctcaaaacaaatgataaccatacacaacactaaaggacgaacctgatctcttatactagtatccttaatcatttttattgccacaactaacctcctcggactcctgcctcactcatttacaccaaccacccaactatctataaacctagccatggccatccccttatgagcgggcacagtgattataggctttcgctctaagattaaaaatgccctagcccacttcttaccacaaggcacacctacaccccttatccccatactagttattatcgaaaccatcagcctactcattcaaccaatagccctggccgtacgcctaaccgctaacattactgcaggccacctactcatgcacctaattggaagcgccaccctagcaatatcaaccattaaccttccctctacacttatcatcttcacaattctaattctactgactatcctagaaatcgctgtcgccttaatccaagcctacgttttcacacttctagtaagcctctacctgcacgacaacacataa

SEQ ID NO: 681 - DNA, 207 bp, Homo sapiens
  source 1..207: mol_type = genomic DNA
atgccccaactaaatactaccgtatggcccaccataattacccccatactccttacactattcctcatcacccaactaaaaatattaaacacaaactaccacctacctccctcaccaaagcccataaaaataaaaaattataacaaaccctgagaaccaaaatgaacgaaaatctgttcgcttcattcattgcccccacaatcctag

SEQ ID NO: 682 - DNA, 1542 bp, Homo sapiens
  source 1..1542: mol_type = genomic DNA
atgttcgccgaccgttgactattctctacaaaccacaaagacattggaacactatacctattattcggcgcatgagctggagtcctaggcacagctctaagcctccttattcgagccgagctgggccagccaggcaaccttctaggtaacgaccacatctacaacgttatcgtcacagcccatgcatttgtaataatcttcttcatagtaatacccatcataatcggaggctttggcaactgactagttcccctaataatcggtgcccccgatatggcgtttccccgcataaacaacataagcttctgactcttacctccctctctcctactcctgctcgcatctgctatagtggaggccggagcaggaacaggttgaacagtctaccctcccttagcagggaactactcccaccctggagcctccgtagacctaaccatcttctccttacacctagcaggtgtctcctctatcttaggggccatcaatttcatcacaacaattatcaatataaaaccccctgccataacccaataccaaacgcccctcttcgtctgatccgtcctaatcacagcagtcctacttctcctatctctcccagtcctagctgctggcatcactatactactaacagaccgcaacctcaacaccaccttcttcgaccccgccggaggaggagaccccattctataccaacacctattctgatttttcggtcaccctgaagtttatattcttatcctaccaggcttcggaataatctcccatattgtaacttactactccggaaaaaaagaaccatttggatacataggtatggtctgagctatgatatcaattggcttcctagggtttatcgtgtgagcacaccatatatttacagtaggaatagacgtagacacacgagcatatttcacctccgctaccataatcatcgctatccccaccggcgtcaaagtatttagctgactcgccacactccacggaagcaatatgaaatgatctgctgcagtgctctgagccctaggattcatctttcttttcaccgtaggtggcctgactggcattgtattagcaaactcatcactagacatcgtactacacgacacgtactacgttgtagcccacttccactatgtcctatcaataggagctgtatttgccatcataggaggcttcattcactgatttcccctattctcaggctacaccctagaccaaacctacgccaaaatccatttcactatcatattcatcggcgtaaatctaactttcttcccacaacactttctcggcctatccggaatgccccgacgttactcggactaccccgatgcatacaccacatgaaacatcctatcatctgtaggctcattcatttctctaacagcagtaatattaataattttcatgatttgagaagccttcgcttcgaagcgaaaagtcctaatagtagaagaaccctccataaacctggagtgactatatggatgccccccaccctaccacacattcgaagaacccgtatacataaaatctaga

SEQ ID NO: 683 - DNA, 784 bp, Homo sapiens
  source 1..784: mol_type = genomic DNA
atgacccaccaatcacatgcctatcatatagtaaaacccagcccatgacccctaacaggggccctctcagccctcctaatgacctccggcctagccatgtgatttcacttccactccataacgctcctcatactaggcctactaaccaacacactaaccatataccaatgatggcgcgatgtaacacgagaaagcacataccaaggccaccacacaccacctgtccaaaaaggccttcgatacgggataatcctatttattacctcagaagtttttttcttcgcaggatttttctgagccttttaccactccagcctagcccctaccccccaattaggagggcactggcccccaacaggcatcaccccgctaaatcccctagaagtcccactcctaaacacatccgtattactcgcatcaggagtatcaatcacctgagctcaccatagtctaatagaaaacaaccgaaaccaaataattcaagcactgcttattacaattttactgggtctctattttaccctcctacaagcctcagagtacttcgagtctcccttcaccatttccgacggcatctacggctcaacattttttgtagccacaggcttccacggacttcacgtcattattggctcaactttcctcactatctgcttcatccgccaactaatatttcactttacatccaaacatcactttggcttcgaagccgccgcctgatactggcattttgtagatgtggtttgactatttctgtatgtctccatctattgatgagggtctt

SEQ ID NO: 684 - DNA, 1141 bp, Homo sapiens
  source 1..1141: mol_type = genomic DNA
atgaccccaatacgcaaaactaaccccctaataaaattaattaaccactcattcatcgacctccccaccccatccaacatctccgcatgatgaaacttcggctcactccttggcgcctgcctgatcctccaaatcaccacaggactattcctagccatgcactactcaccagacgcctcaaccgccttttcatcaatcgcccacatcactcgagacgtaaattatggctgaatcatccgctaccttcacgccaatggcgcctcaatattctttatctgcctcttcctacacatcgggcgaggcctatattacggatcatttctctactcagaaacctgaaacatcggcattatcctcctgcttgcaactatagcaacagccttcataggctatgtcctcccgtgaggccaaatatcattctgaggggccacagtaattacaaacttactatccgccatcccatacattgggacagacctagttcaatgaatctgaggaggctactcagtagacagtcccaccctcacacgattctttacctttcacttcatcttgcccttcattattgcagccctagcaacactccacctcctattcttgcacgaaacgggatcaaacaaccccctaggaatcacctcccattccgataaaatcaccttccacccttactacacaatcaaagacgccctcggcttacttctcttccttctctccttaatgacattaacactattctcaccagacctcctaggcgacccagacaattataccctagccaaccccttaaacacccctccccacatcaagcccgaatgatatttcctattcgcctacacaattctccgatccgtccctaacaaactaggaggcgtccttgccctattactatccatcctcatcctagcaataatccccatcctccatatatccaaacaacaaagcataatatttcgcccactaagccaatcactttattgactcctagccgcagacctcctcattctaacctgaatcggaggacaaccagtaagctacccttttaccatcattggacaagtagcatccgtactatacttcacaacaatcctaatcctaataccaactatctccctaattgaaaacaaaatactcaaatgggcct

SEQ ID NO: 685 - DNA, 2712 bp, Homo sapiens
  source 1..2712: mol_type = genomic DNA
atggcttctgtttggcagagattgggtttttatgcctctcttctgaaaagacagctaaatggtgggccagatgtcatcaagtgggaaaggagagtaattcccggatgtaccagaagcatctacagtgccacgggaaagtggacaaaagagtatacattgcagacaagaaaggatgttgagaaatggtggcatcaacgaataaaagaacaggcctccaaaatttcagaagctgataaatcgaagccaaaattttacgtgctttccatgttcccttatccttctggtaagctgcacatgggccatgtgcgtgtctacaccatcagcgacaccatagcacggttccagaagatgagagggatgcaggtcatcaaccccatgggatgggatgcttttggattgcctgctgaaaatgccgcagtcgagaggaatctacatccacaaagttggacacaaagtaatattaaacacatgaggaaacagcttgatcgtctgggcctgtgtttcagctgggatagggaaataactacgtgtttgccagattactacaagtggactcagtatctctttattaaactgtatgaggctgggctggcctatcaaaaggaggccctggttaactgggacccagtggatcaaacagtgcttgccaatgagcaggtggatgaacatggctgttcatggcgttctggagcaaaggtggaacagaagtacctcagacaatggtttattaagacaaccgcttatgcaaaggccatgcaggacgcgttggcagaccttccagaatggtatggaataaaaggcatgcaagcccactggattggggactgtgtgggctgccacctggacttcacattaaaggttcatgggcaagccacgggcgaaaagctgactgcctatacggccacccctgaagccatttatggcacctcccacgtggccatctcgcccagccacagactcctacatgggcacagctctctgaaggaagccttgaggatggcccttgtccctggcaaagattgcctcacgcctgtaatggctgtgaacatgcttacccagcaggaggtccctgtcgttattttggccaaagctgacttggaaggctctctggattcaaaaataggaattcccagtactagctcagaggacaccatcttagcccaaaccctgggcctggcctactctgaagtcattgaaactttgccagatggcacagagagactgagcagctctgctgagttcacaggtatgacccggcaggatgcttttctagccctgactcagaaagcccgggggaagagagtgggtggagacgtgacaagtgataaactgaaagactggctgatttcacggcagcggtactggggcacaccaatccccattgtccactgcccagtctgtggccccacacctgtgcccctggaggacttgcctgtgaccctgcccaacatcgcgtctttcactggcaagggaggccccccactggccatggcttcagagtgggtgaactgctcctgcccaaggtgcaagggagcagccaagagagagacagacacgatggatacctttgttgattctgcttggtactacttcagatacactgaccctcataatccacacagcccttttaacacagcagtggccgattactggatgcctgtggatttgtacattggagggaaagaacatgccgtcatgcacttgttctatgcaagattctttagtcatttttgccatgatcaaaaaatggttaaacatagggagccttttcataagctgctggcccaaggccttatcaaggggcagacattccgcctaccatctggacagtatctacagagagaggaagtggatctcacaggttccgttcctgttcatgcaaaaacgaaagagaagttagaggtgacgtgggagaagatgagtaagtccaaacacaacggggtggacccagaggaagttgtggagcagtatgggatcgacacgattcggctctacatcctttttgctgcccctcctgagaaggatatcttgtgggatgtgaaaactgatgctctccctggggtgctgagatggcaacaacgactgtggaccttgacaactcggtttattgaggccagggcttctgggaagtctccccagcctcagctgctgagtaacaaggagaaagctgaggccaggaagctctgggagtacaagaactccgtcatctctcaggtgaccacccatttcacagaggacttctcactgaattctgcaatttctcagctgatgggactcagcaatgccctctcgcaagcctctcagagcgtcattctccacagccccgagtttgaggatgctttgtgtgccctgatggtaatggctgctccactggcccctcatgtaacctcagagatctgggcaggcctggcgctggtgccgaggaagctctgtgcccactacacttgggatgccagtgtgctgctccaggcatggcctgctgtggacccggagttcctgcagcagcctgaggttgtccagatggcagttctgatcaacaataaagcttgtggcaaaattcctgtgccccaacaagttgcccgggaccaggacaaagtccacgaatttgttcttcaaagcgagctgggtgtcaggcttttgcaaggacgaagcatcaagaagtccttcctttccccgagaactgccctcatcaacttcctggtgcaagattga

SEQ ID NO: 686 - DNA, 1572 bp, Homo sapiens
  source 1..1572: mol_type = genomic DNA
atggcggcgctcctgaggagactgctgcagcgcgagaggccttcggcggcctctggccgccccgtaggacggcgcgaggccaacctgggcactgatgccggggttgcggtgcgagtgcggttcgctcccagccccacaggcttcttgcacctgggtggcctccgcactgccttgtacaactacatctttgctaagaagtaccaggggagcttcatcctgaggctagaggacacagatcagactcgcgttgtgcctggggcagcggagaatattgaggacatgctggagtgggcaggcatcccgcctgatgagagcccccgccggggcggtcctgctgggccctaccagcaatctcagcggttggagctgtatgcccaggccacagaagcgctgctgaagaccggagctgcttacccctgtttctgctcaccccagcggctggagctcctgaagaaggaggccttgcggaaccaccagacgccccggtatgacaatcggtgcaggaacatgagccaggagcaggtggcccagaagctggccaaggaccccaagcctgcgatccgcttccgcctggagcaggtggtgccagccttccaggacctggtctatggctggaataggcatgaagtggccagcgtggagggagacccagtcatcatgaagagcgacggcttccccacataccacctggcctgcgtggtggacgaccaccacatgggcatcagccacgtgctgcgaggctctgagtggctcgtctccactgccaagcacctgctcctctaccaggccctgggctggcagccaccccacttcgcccacctgcccctgctcctcaacagggatggcagcaagctctccaagaggcaaggggacgttttcctggagcactttgctgctgatggcttcctgcccgattccttgttggacatcatcaccaactgtggctcaggttttgcagagaaccaaatgggcaggaccctgccggagctgatcacacagttcaacctgacacaggtcacctgtcactcagccctgctggacctggagaagctcccagaattcaacagactgcacctccagcggctggtgagcaatgagagccagaggcgccagctggtggggaagctgcaggtccttgtggaggaggcctttggttgccagctgcaaaacagggatgtcctcaacccagtctacgtggagaggatcctcctgctgagacagggtcacatttgccgcctgcaggacttggtgtccccagtatactcttacctgtggactcgccctgcagtaggtcgagcacagctggacgccatctcggagaaggtggatgtgattgccaagcgtgtgctggggcttctagaaagatctagtatgagcttaactcaggatatgctgaatggagaactgaagaagctatcagaaggtctggaaggcaccaagtacagtaatgtgatgaaactccttcggatggccctcagtggacagcagcaaggacctcctgtagctgagatgatgttggccttgggaccaaaggaagtacgggaacggatccagaaggtggtttccagctag

SEQ ID NO: 687 - DNA, 1794 bp, Homo sapiens
  source 1..1794: mol_type = genomic DNA
atggcggccgtgcaggcggccgaggtgaaagtggatggcagcgagccgaaactgagcaagaatgagctgaagagacgcctgaaagctgagaagaaagtagcagagaaggaggccaaacagaaagagctcagtgagaaacagctaagccaagccactgctgctgccaccaaccacaccactgataatggtgtgggtcctgaggaagagagcgtggacccaaatcaatactacaaaatccgcagtcaagcaattcatcagctgaaggtcaatggggaagacccatacccacacaagttccatgtagacatctcactcactgacttcatccaaaaatatagtcacctgcagcctggggatcacctgactgacatcaccttaaaggtggcaggtaggatccatgccaaaagagcttctgggggaaagctcatcttctatgatcttcgaggagagggggtgaagttgcaagtcatggccaattccagaaattataaatcagaagaagaatttattcatattaataacaaactgcgtcggggagacataattggagttcaggggaatcctggtaaaaccaagaagggtgagctgagcatcattccgtatgagatcacactgctgtctccctgtttgcatatgttacctcatcttcactttggcctcaaagacaaggaaacaaggtatcgccagagatacttggacttgatcctgaatgactttgtgaggcagaaatttatcatccgctctaagatcatcacatatataagaagtttcttagatgagctgggattcctagagattgaaactcccatgatgaacatcatcccagggggagccgtggccaagcctttcatcacttatcacaacgagctggacatgaacttatatatgagaattgctccagaactctatcataagatgcttgtggttggtggcatcgaccgggtttatgaaattggacgccagttccggaatgaggggattgatttgacgcacaatcctgagttcaccacctgtgagttctacatggcctatgcagactatcacgatctcatggaaatcacggagaagatggtttcagggatggtgaagcatattacaggcagttacaaggtcacctaccacccagatggcccagagggccaagcctacgatgttgacttcaccccacccttccggcgaatcaacatggtagaagagcttgagaaagccctggggatgaagctgccagaaacgaacctctttgaaactgaagaaactcgcaaaattcttgatgatatctgtgtggcaaaagctgttgaatgccctccacctcggaccacagccaggctccttgacaagcttgttggggagttcctggaagtgacttgcatcaatcctacattcatctgtgatcacccacagataatgagccctttggctaaatggcaccgctctaaagagggtctgactgagcgctttgagctgtttgtcatgaagaaagagatatgcaatgcgtatactgagctgaatgatcccatgcggcagcggcagctttttgaagaacaggccaaggccaaggctgcaggtgatgatgaggccatgttcatagatgaaaacttctgtactgccctggaatatgggctgccccccacagctggctggggcatgggcattgatcgagtcgccatgtttctcacggactccaacaacatcaaggaagtacttctgtttcctgccatgaaacccgaagacaagaaggagaatgtagcaaccactgatacactggaaagcacaacagttggcacttctgtctag

SEQ ID NO: 688 - DNA, 1521 bp, Homo sapiens
  source 1..1521: mol_type = genomic DNA
atgcccctgctcggacttcttcccaggagggcctgggcttcgctgctcagccagctcctgcgaccgccctgcgcttcgtgcaccggggcggtccgttgccaaagccaggttgcagaggcagtgttaacatcccaactgaaagcacatcaagagaaaccaaattttattatcaagaccccaaagggtaccagggatcttagtcctcagcatatggttgtgagggagaaaattcttgatttggttatcagctgctttaaacgtcatggagcaaaggggatggacaccccagcatttgagctgaaggaaaccctgactgagaagtatggagaggactctgggctcatgtatgatctgaaggatcaaggtggagagctgttgtccctccgctatgaccttactgttccctttgctcgttatctggccatgaataaggtgaagaagatgaaacgttatcatgttggaaaggtgtggcggcgagagagcccaaccatagtccaaggccgttatagggagttctgccagtgtgattttgacattgctggtcagtttgaccctatgatccccgatgcagagtgtttgaagatcatgtgtgaaatcctaagtggattgcagttgggagactttctcattaaggtaaatgaccggcggattgtggatgggatgtttgctgtctgtggtgttcctgaaagcaagttccgtgccatctgctcctccatagataaactagacaagatggcttggaaagatgtgagacatgagatggtggtgaagaaaggcctggctcctgaggtggctgatcgaattggggactatgtccagtgtcatggtggggtatccctagtagagcaaatgtttcaggatcccagactatcccagaacaagcaggccctggagggcctgggagacctaaagctgctatttgaatacctgactttatttggaattgctgataagatctcctttgacctcagcctggctcggggcctagactactatacaggagtgatctatgaagcagtgctgctgcagaccccaactcaggctggggaggagcccctgaatgtgggcagtgtggctgctggtgggcgctatgatgggctggtgggcatgtttgaccccaagggccacaaggtgccatgtgtgggactcagcattggggttgagcgaatcttctacattgtggagcagaggatgaagaccaaaggtgagaaggtgcggactacagagactcaagtgtttgtggccacaccacagaagaactttctccaagaacggttgaagcttattgcagagctttgggattctggaatcaaggcagagatgctatacaagaacaaccccaaactattaacccagctgcactattgtgagagcacaggcattccactggtggtcattattggtgagcaagaactgaaagaaggggtcatcaagatccgttcagtggccagcagagaggaggtggccattaaacgggaaaattttgtggctgaaattcagaagcgactgtctgagtcttga

SEQ ID NO: 689 - DNA, 1557 bp, Homo sapiens
  source 1..1557: mol_type = genomic DNA
atggctgcgtccatggcgcggcgcttgtggcctttgctgactcgtcgggggttccggccccggggaggctgcatctccaacgatagtccaaggagaagtttcactacagagaaacgaaaccggaacctcctgtacgagtatgcgcgcgagggctacagcgcactccctcagctggacatagagcggttctgcgcatgcccagaagaggccgcacacgccctggagctccgcaagggggagctgcgctcggcggacctgcccgcgatcatctcgacatggcaggagctgaggcagctgcaggagcagatccggagcctggaggaagagaaggcagctgtgactgaggcagtgcgggccctgctggcaaaccaggacagtggtgaagtgcagcaggaccccaagtaccagggtctgcgggcacgtggccgggagatccggaaggagcttgttcacctgtaccccagggaggcccagcttgaggagcagttctacctgcaggcgctgaagctgcccaaccagacccacccagacgtgcccgtcggggatgagagccaggctcgagtgctccacatggtcggagacaagccagttttctccttccaacctcggggccacctggaaattggcgagaaactcgacatcatccgtcagaagcgcctgtcccacgtgtctggccaccggtcctattacctgcgcggggctggagccctcctgcagcacggcctggtcaacttcacattcaacaagcttctccgccggggcttcacccccatgacggtgccagaccttctccgcggagcagtgtttgaaggctgtgggatgacaccaaatgccaacccatcccaaatttacaacatcgaccctgcccgcttcaaagatctcaacctggctggaacagcggaggtggggcttgcaggctacttcatggaccacaccgtggccttcagggacctgccagtcaggatggtttgctccagcacctgctaccgggcagagacaaacacgggacaggaaccccgggggctgtatcgagtacaccacttcaccaaggtggagatgtttggggtgacaggccctgggctggagcagagctcacagctgctggaggagttcctgtcccttcagatggagatcttgacagagctgggcttgcacttccgggtcctggatatgcccacccaagaactgggcctccccgcctaccgcaagtttgacattgaggcctggatgccaggccgaggccgctttggagaggtcaccagtgcttccaactgcacagacttccagagccgccgcctccacatcatgttccagaccgaggctggggagctgcagtttgcccacacggtgaacgccaccgcctgtgctgtcccccgccttctcatcgcgctcctggagagtaaccagcagaaggacggctcagtgctcgtgccccctgccctccagtcctacctcggcactgatcggatcacagcccctacccacgtgcctctccagtacatcggccccaaccagccccggaagcctgggctgcctggccagcctgctgtaagctaa

SEQ ID NO: 690 - DNA, 1428 bp, Homo sapiens
  source 1..1428: mol_type = genomic DNA
atggaagggctgctgacaagatgcagagcattgcccgccctggccacctgcagccgccagctctctgggtatgttccttgcaggtttcaccactgtgccccaagaagagggcggcgcctgctgctgtctcgtgtgttccagccacagaaccttcgggaagaccgggtgctctccctgcaggacaaatctgatgacctgacctgtaagagccagcggctgatgctgcaggtgggcctgatctacccagcaagccccggctgttaccacctcctgccatataccgtccgtgccatggagaagctcgtgcgagtgatagaccaggagatgcaggccatcgggggccagaaagtcaacatgcccagcctcagcccggcagagctctggcaagccaccaaccggtgggacttgatgggcaaagagctgctaagacttagagacaggcatggcaaggaatactgcttaggaccaactcacgaggaagccattacggccttaattgcctcccagaagaaactgtcctacaagcagcttcccttcctgctgtaccaagtgacaaggaagtttcgggatgagcccaggccccgctttggtcttctccgtggccgagagttttacatgaaggatatgtacacctttgactcctccccagaggctgcccagcagacctacagcctggtgtgtgatgcctactgcagcctgttcaacaagctagggctgccatttgtcaaggtccaggccgatgtgggcaccatcgggggcacagtgtctcatgagttccagctcccagtggatattggagaggaccggcttgccatctgtccccgctgcagcttctcagccaacatggagacactagacttgtcacaaatgaactgccctgcttgccagggcccattgactaaaaccaaaggcattgaggtggggcacacattttacctgggtaccaagtactcatccattttcaatgcccagtttaccaatgtctgtggcaaaccaaccctggctgaaatggggtgctatggcttgggtgtgacacggatcttggctgctgccattgaagtcctctctacagaagactgtgtccgctggcccagcctactggccccttaccaagcctgcctcatcccccctaagaagggcagtaaggagcaggcggcctccgagctcatagggcagctgtacgaccacatcacagaggcagtgcctcagcttcacggggaggtgctcctggacgacaggacccatctgaccatcggaaacagactgaaagatgccaacaagtttggctacccctttgtgataatcgctggcaagagggccctggaggaccctgcacattttgaggtttggtgtcagaacactggtgaggtggccttcctcaccaaagatggagtcatggatttactgaccccagtgcagactgtctaa

SEQ ID NO: 691 - DNA, 849 bp, Homo sapiens
  source 1..849: mol_type = genomic DNA
atggagccgaaagtcgcagagctgaagcagaagatcgaggacacgctatgtccttttggcttcgaggtttaccccttccaggtggcatggtacaatgaactcttgcctccagccttccacctaccgctgccaggacctaccctggccttcctggtactcagcacgcctgccatgtttgaccgggccctcaagcccttcttgcagagctgccacctccgaatgctgactgacccagtggaccagtgtgtggcctaccatctgggccgtgttagagagagcctcccagagctgcagatagaaatcattgctgactacgaggtgcaccccaaccgacgccccaagatcctggcccagacagcagcccatgtagctggggctgcttactactaccaacgacaagatgtggaggctgacccatgggggaaccagcgcatatcaggtgtgtgcatacacccccgatttgggggctggtttgccatccgaggggtagtgctgctgccagggatagaggtgccagatctgccacccagaaaacctcatgactgtgtacctacaagagctgaccgtatcgccctactcgaaggcttcaatttccactggcgtgattggacttaccgggatgctgtgacaccccaggagcgctactcagaagagcagaaggcctacttctccactccacctgcccaacgattggccctattgggcttggctcagccctcagagaagcctagttctccctccccggaccttccctttaccacacccgcccccaagaagcctgggaatcccagcagagcccggagctggctcagccccagggtctcaccacctgcatcccctggcccttga

SEQ ID NO: 692 - DNA, 1086 bp, Homo sapiens
  source 1..1086: mol_type = genomic DNA
atggccacagctgcctcgaatccctacagcattctcagttccacctccctagtccatgcggactctgcgggcatgcagcaggggagtcctttccgcaaccctcagaaacttctccaaagtgattacttgcagggagttcccagcaatgggcatcccctcgggcatcactgggtgaccagtctgagcgacgggggcccatggtcctccacactggccaccagccccctggaccagcaggacgtgaagcccgggcgcgaagacctgcaactgggtgcgatcatccatcaccgctcgccacacgtagcccaccactcaccgcacactaaccaccccaacgcctggggggccagcccggcaccgaacccgtctatcacgtcaagcggccaacccctcaacgtgtactcgcagcctggcttcaccgtgagcggcatgctggaacacgggggactcaccccacctccagctgccgcctctgcacagagcctgcacccggtgctccgagagcccccggatcacggcgaactgggctcgcaccattgccaggatcactccgacgaggagacgccaacctctgatgagttggaacagttcgccaaacaattcaaacaaagaagaatcaagttgggcttcacgcaggccgacgtggggttggcgctgggcacactgtatggtaacgtgttctcgcagaccaccatctgcaggttcgaggccttgcagctgagcttcaaaaatatgtgcaagctgaagcccctgctgaacaagtggctggaggaggcggattcgtccacagggagcccgaccagcattgacaagatcgctgcacagggccgcaagcgcaagaagcggacctccatcgaggtgagtgtcaagggcgtactggagacgcatttcctcaagtgtcccaagcctgccgcgcaggagatctcctcgctggcagacagcctccagttggagaaggaagtggtgcgtgtctggttctgtaatcgaagacaaaaagagaaaagaatgactccgccaggggatcagcagccgcatgaggtttattcgcacaccgtgaaaacagacacatcttgccatgatctctga

SEQ ID NO: 693 - DNA, 2238 bp, Homo sapiens
  source 1..2238: mol_type = genomic DNA
atgctaccattcgctcctcaggacgagccctgggaccgagaaatggaagtgttcagcggcggcggcgcgagcagcggcgaggtaaatggtcttaaaatggttgatgagccaatggaagagggagaagcagattcttgtcatgatgaaggagttgttaaagaaatccctattactcatcatgttaaggaaggctatgagaaagcagatcctgcacagtttgagttgctcaaggttcttggtcaggggtcatttggaaaggtttttcttgttagaaagaagaccggtcctgatgctgggcagctctatgcaatgaaggtgttaaaaaaagcctctttaaaagttcgagacagagttcggacaaagatggagagggatatactggtggaagtaaatcatccatttattgtcaaattgcactatgcctttcagactgaagggaaactgtacttaatactggattttctcaggggaggagatgttttcacaagattatccaaagaggttctgtttacagaggaagatgtgaaattctacctcgcagaactggcccttgctttggatcatctgcaccaattaggaattgtttatagagacctgaagccagaaaacattttgcttgatgaaataggacatatcaaattaacagattttggactcagcaaggagtcagtagatcaagaaaagaaggcttactcattttgtggtacagtagagtatatggctcctgaagtagtaaataggagaggccattcccagagtgctgattggtggtcatatggtgttcttatgtttgaaatgcttactggtactctgccatttcaaggtaaagacagaaatgagaccatgaatatgatattaaaagcaaaacttggaatgcctcaatttcttagtgctgaagcacaaagtcttctaaggatgttattcaaaaggaatccagcaaatagattgggatcagaaggagttgaagaaatcaaaagacatctgttttttgcaaatattgactgggataaattatataaaagagaagttcaacctcctttcaaacctgcttctggaaaaccagatgatactttttgttttgatcctgaatttactgcaaaaacacctaaagattctcccggtttgccagccagtgcaaatgctcatcagctcttcaaaggattcagctttgttgcaacttctattgcagaagaatataaaatcactcctatcacaagtgcaaatgtattaccaattgttcagataaatggaaatgctgcacaatttggtgaagtatatgaattgaaggaggatattggtgttggctcctactctgtttgcaagcgatgcatacatgcaactaccaacatggaatttgcagtgaagatcattgacaaaagtaagcgagacccttcagaagagattgaaatattgatgcgctatggacaacatcccaacattattactttgaaggatgtctttgatgatggtagatatgtttaccttgttacggatttaatgaaaggaggagagttacttgaccgtattctcaaacaaaaatgtttctcggaacgggaggctagtgatatactatatgtaataagtaagacagttgactatcttcattgtcaaggagttgttcatcgtgatcttaaacctagtaatattttatacatggatgaatcagccagtgcagattcaatcaggatatgtgattttgggtttgcaaaacaacttcgaggagaaaatggacttctcttaactccatgctacactgcaaactttgttgcacctgaggttcttatgcaacagggatatgatgctgcttgtgatatctggagtttaggagtccttttttacacaatgttggctggctacactccatttgctaatggccccaatgatactcctgaagagatactgctgcgtataggcaatggaaaattctctttgagtggtggaaactgggacaatatttcagacggagcaaaggatttgctttcccatatgcttcatatggacccacatcagcggtatactgctgaacaaatattaaagcactcatggataactcacagagaccagttgccaaatgatcagccaaagagaaatgatgtgtcacatgttgttaagggagcaatggttgcaacatactctgccctgactcacaagacctttcaaccagtcctagagcctgtagctgcttcaagcttagcccagcgacggagcatgaaaaagcgaacatcaactggcctgtaa

SEQ ID NO: 694 - DNA, 9594 bp, Homo sapiens
  source 1..9594: mol_type = genomic DNA
atggagataagattagaaatcttgacatcaacaggtattaagcagaaaaaaccatggccacgtgtctcctggttgggaaaggaaaaagaagccgtttttcttttggatgataaattcataaatgaaattaatttgctatcaggaaagataaagaagaaaattcctagtctgcagcctttcttgaaggatgttattgtcctaacaacatccagtaatgatgcctggctggctggggtactaactacaggagagcttttcctttggaacaaagatcaagattgtttgaaaactataccaataactgaaaagcctaaggaaatgatcaaagctacagtcgcaagctctttgagactgtacttgtatgtatctggaaatgggaaaagaattgtgctcataacaccttctggatgcatatttctttgggaatatttggaattaaagaatatcttatcttctaaaagcctttcattggcgggtcggtggtcccaggtcatacctgaagaagcagttctcttgccttccaccgaagataaagaagctgtagtgaatgctgtttttataaaaaatgagttatttggagactgctgcctgtgttcatttactttttattctggggaatgcctgaagttaacatttctagcaattcggtggcatgagaatgtatttacatctgtaagatcattgccataccatgttcattgggctcaacaagactgtcatctctgtagtttaattcctaaatgtgaatcagtaaagtcaagaggagctctaatttctgccttttcaagagatggccttaccctggcagtaactcttaatcagaaagaccccaaggcaactcaggtattatttataaacacactgaattttgttactctctgtggtagccttaaaggatgtagtaacaagagtcccgtggttccagctacacttattaggtcctactgggtaggtgatatcagctggacgcatgatagtctttttctggcttgtatgttaaaacgtggctctctggttttattgacctgccaaggtgaattgctaacattaattacatttggttgctctatagaatttggcccagcagaatttattcctcttcatccactaataacgtatagaccacagcagtttacgtttcaagattcaaataattctgttgattcatcagcttctgatagtgaccctatgagacagagattttctataaaagcacactcacggttaccctacctcgttatatctgatggatatatggtcacaacccttcgatttcttgatagcctatctccatcagtacacatgagatcacttctacttgattcaacccagaggcttgagaaaatatatcaaagtgtgatattgtctaagccaaaaggcaaaggactgaacttgcgatcactgaattccctaaggtctagcctgttagaacaccaaggaaatgaaagttcagccgatttcactgtccccaaattcttgcaggcagaagaaacaataaatgaaaatgcagcagattttcaggattttgaagcagaagaaactaacgaaggcagacactttccagacaacttatgtcctttttggaacaaaagagatgatgtgctgtgtagtagtatgaaggaaggaagattggaatttgcatctatgtttgatacgatacatgcaaaggatgatagtgaggagacagatagaaccattacagaactgcattctatccagaaaagtctacttgcagcgtggactataggaatttcaaaaactgtgacagaaaaaaatttaatgttaaattacatagtagtttgtatcactcattttttttacattcttcaatttataaaatgtccttttcctaaacttgatcttgttttaagcaaaagctcaagacataatgcatggatactttgtatctttcaactttttcatcagtgtttatcaatccattattgggatataagatacaaacaagatgtggggcatttgataaagctgacctcaaatactgtaaaacttttgctgactcagcaacaaaagggtcagttattctcagagaaacttttagcttgtttttatttactcaaaatggtagctgacaatttaaatggtgtatacattcttcaacctgaagttatttcagcatcagctgatggaagtaaaataacagctcaagactcattggtggtacctatttttcagatgtttcaagatagtggttttcagaaaaactggtcttggaactcatttttcaagattcatcctcaagtagtaaatcctgtgcaacagccaggacacagattgcttattctctggagaatactgtacaaaaaaactttatggtatcaagcacaattaaatcgaagagttcctgaagctgatagtcagttaactgaaaagatgacacatgaagcatctactgtcaagtccctgttatgtcatttgcaggctaacctacagagtactggagattgcttgaatcaaaccttagaacttaaatctatcaatggggaagaatgttttttattaggatcatatgaaaagtctgttcagctgtggaaaaaagctctacaagaaatcgaagagaaaggaggaagaaggacgtattttcttcagatacgctattatctttctctcttatactgccacctctatagctataatttaaatgatgctcaaggattgtgtgatcagctagcaagagaaatcctgagatggtcccaactacctgtaaaagaaaataaagatttttcaggtgctgcaaagtctcattttgagtgtggaatggtgggcggtgttcatcctgaggcagcagtgagagtcgtccagtccatggctcgtttcatggctgcctatttcaccaatcagcagctttgcattttgccccctcatcatgtgaatgttcttcccccacttcatattaaaacagagcagtcctttcgacttattcctctgcaacactctaaggtggccagtgttgttagagatcagaatctctctaatgtgtggacagttgaatatgcacttgaattactatttattggtggcctggttccagaggctgtgtggttggcatataaacttggagactggaagacgtctgtttcaattggtgtggctttccagctgttctgtaaacgtgatagcaatttcatgaggtccaagaaaaagagtctgaatctaccactccgtatgactccagcacagatttttcaggaaaaactgcagtgtgttttaggtcaaccagcctctttggaagcaaaaaatgaaatgggctcaaaatataaacagtttacagatcccattgaagaggaagatgcaaatctgctatttggttcagtacaagaagtactgaaagcatcagttatggccgatgcagatattctttcggagacatttcaacttctgatagactctgccaaggacttcagtaaaagactgtggggcttagtgccattcggcttgtatcttccagctcctccattgtactgtccccagccagctattcttagtgaagaagatggtgatgatcttcttttaaaagctgaaaaaaataatcgccagaaggtatctggaatccttcagcgtgttctcctgcttttccgggcggctcagtgttcttttcctgtagcacagtggtatatattgcagttgaggtgggcaagaaaagtcatgcagaagattcgaatgaaaggatcccttccttcactgagtccttttcctcagtcattacttaattactgtaaaggaggtatcgcattttttagacctggagcagctggagaccacaagcttgatgaagtttccattagagcaataggttgcttcagagaactttgtgctctgtgttggatgctgcatgtccgtgataagttatcctatagttgcaggcaatatcagaaagcaagagaaaatgtaaaaggagaaaaggaccttgaagtggagtttgattcttgtatgattgagcactgtcttagtgcagtggaatgggcttatagaatgctgcctttctctcggttttttaatatggaagaacttattcaggatataattttgagccttattggagaactgccaccaatcagaaaggtagcagaaattttcgtgaaagcatttccctatcctgaggacgtgagggttcctttaagagacaaatatcactctcttcaccagagactcagacactgtgttgtgaaaggaccccagactgaggaaatgatgtctgttgtcatgcattctatccagaaagtgagggtgaaagctctaaaacgtgtgcagagaaatataggctcttttgaagtgaatatatgggaaccaattgaagaagagaaaccagatgaggctccaggtgttgacagatattccctggggactagtttgagcagaagtacactcacagaactaggagattctgtggttcacagtgatgcagatacgttctctgaagctttgtcggttgaagaaaaaagtaggataaatatctatcaaagaaatgccccaaatcacatggaattaacatcaattcataagccaactgataaaaggaaaatgtgtaatcagaaagaaaatcctacaaagaaagaagatcatgaaaagttatcacaaaatacacttcctgtaataggtgtttgggaatttgaacgtgatgatgatgaatatattaaattccttgatctgtttttgagttacattcttgaaagagacctaccttattccagggatgctgacattccatttctaactagtttttctggaaagcttagagaacatgaacttaattctttactttttgatgtacatacaacattaaaacgacatcagagcaaaactaaaagccagaatgtgtttagagctggttcttgctttgttgttgctcctgagtcctatgaatcagaaaaatcatcctctttaaatgatgaatatggcatgcatttagaaaaccagaaactttcatcatcagtactggttaatcaagggatcaaaccttttttacaatatccttcgaatgaagtcaataagaatgaaggaatgagtggattatttggtttaaaacaaaggtcaatttacaaaatacaagatgacactagagagaaatgtctaatccagagatcatcaaaccacattttttggactcccaagtccattaaaactagaagatgtattttcaaagctattcagtgcaatgatattaaccctcaagaagatcttcctttagcactaaacacttttggcagtataggaagactgctggaatggatgataaggtggtctaatagaaggctactctgtgattctggtataactgagtcatcctctgagtacagtccagtaattcgtgtaaagacctctacagctgccattcttacatcattatggcttttggaacaaccctattttgctacatataaggcaaaaaatgccattattaagatggtagagaatcgtgacactgggtgtcagattggacccaatattgagagggagagcaaatcagatgctggcggttcagttgcagtagcaactccaggtggaactgaggaaagaaatggtcagaataaatcttgtcaaaatatcttgaatagaatgccaactgaagcaaaaaatcctgatataaaagaaatcaatgatgatattatttccatcactcataatactaaaaaagaatttatagatattgatgagaatcttttagaagtagaagcatttacagaagaggaaatggatatgcacatatcagactatgaagaagacattgaagaatctgttggaggtttcagaagtcccagtcttgccatttgcatgatgactttaccacagcagttagaagaagagttcacagaagaggttcagtgtcaaagggaagaaccactggagacaattatggaggaaaaatcgactgaacaaaaaggtatgatcgaagccttttcacatcctgggcataccactcctcaatcaatgcaagtagatacgagttcagaaatttctagtgcacagatttctacatataaagaaaaatcttcctcagttccacttctgatatcaaatggagtcaatgttgcttcacaaccacctgctccaacacctcagaagacccagagaaatgaattcacggctcagttaccagattgttcggagtccgttaggcagatgctgcaagatgaaatgtttaaattagttcagctgcaacagatcaacttcatgagcctaatgcaaatagtaggatcatcctttgctaatctcccagatacacaacaacttgtacagcagtctcagtctgtgcatttaggggaaagccaagaatcaaacctaagaggatgtggtgatgttgaagacagcaacaaaaatcttaaggagagattttttattaaaccacagtcaatgggagagaacgccagagagcctcgcaagaacagcccacactgccatgaaggaactatcccatctggtcaaaatagtactggaaacgtacagaatgttccacatgggagtattcctttatgtcaattaaatggccagccccggaaaaaaggaccaattccatcatctcaaaacttaccatccacttcgttttatccagctcctgctggaaatactcacctctaccttttgtccacaccttctgttgttcagaaggcacctagacttatcccacatgcaaaaacatttagtcctggtgatggctttcctttgcttcaatttaagtctaaacaagaattccagccccttttcttacatacaggaagtattccacaagttcccttcaggcctttgccacaaccaagagaggcttggggattatctgactccttccaacctgctctgccacagagagcagcacaaactactccagcatcccatttgaatgtaagccagtataacactgaagccagaaaaaaagaagttgagcagaagacgtgggcagaaactgtaattacagaaattcctaatcatgtgaacttggatcaatatgttggacaagaaaatttgacacctcaacaggactcttcagtgtttataaaaccagaaaaactatttgatgttaagccagggacccttgagatatctcctcaccattcctttggacttccgttactatacctgccacttaaacctcctaatatgtttccatcaacctcaagagcatctattacagttccctcaacacctatccaacctatagcagaagaaagaaaatacccaagattgtcattacttcattcacatttgtccccagaaaataggtgcaaaaaaacacaacttatcccacttgaaaacctcattgcgtttaaacaaagccaacagaaactaacacataatttatttgaacaaggtgatgctggacaccttcaacttctaaaggtcaaaatagaaccacctgaagtaagacaaggaaaggacagtaaaaaaaggcaaagaagaagagctgagaaagagctgcaagaaaaaagatgtgagaaactgaggagaaaaccaaatgtgacttttcgaccagagaattccataattaataatgatgattcagaaatcattaagaaacccaaggaacaacaagaacattgtggttcccatcctttggatgacttcgacgttccttttgaaatgctacaagatgataatacttcagctggattgcatttcatggcctctgtaaaaaagaaagctataggaagtcaagatgcaagtacaaatacagacccagaacatgagcctttgactgctcctcagctcttggtcccagatgtctatctaaatctgaagctttccagtgaaatgtcagagaaaccttggtcaccctcaatacctcatacagtaacaaacttggaattacctgtgagagaagagccttcaaatgataatgttatcaaacagcaaagcgatcatctagcagttccatcgtctgcagagttacattatatggcagcttcagttactaatgctgttcccccacataattttaagagtcaaggtctgccaaaaccagagttccgattcaaaggacagagcacaaagtcagactctgcagaagattatctattgtggaaacggctgcaaggtgtctctgcagcttgccctgcaccaagctctgcagctcaccaactagagcatctcagtgctaagcttcagaaaattgacgagcagttgctagcaatacagaacattgctgaaaacatagaacaggatttccccaagcctgaaatgctagatctacattgtgataagattggaccagtggatcacattgaattctcttctggccctgaattcaaaaaaacattagcttcaaaaaccattagcatttctgaagaagtgcgttttttgacccatatggatgaagaagatcaaagtgacaaaaaggagacttcagaacctgaattttcaataacagaaaattattctggtcagaaaacctgtgtgtttcctactgccgattcagctgtcagcctttccagttccagtgatcagaatactacttctcctggtatgaatagcagtgatgaattgtgtgagagtgtttcagtacatccgctccagatgactggattgactgatattgcagacattattgatgaccttataattaaagacggagtttccagtgaagaacttggcttaacagaacaagctatgggcacctccagaattcagcattattctggcagacattcacaaagaactgacaaggaaagaagagagattcaagcctggatgaaaagaaaacgaaaagaaagaatggcaaagtacttaaatgagctggcagaaaagagagggcaagaacatgatcctttctgtcccagaagcaatccactttacatgacttcaagggaaataaggctgagacaaaagatgaagcatgaaaaagacagattgctgctctctgaacactatagtcgtcgaatctcacaagcgtacggtctgatgaatgaactgttatctgagtcagtacagctaccaactctaccacagaaaccattgcctaacaaacccagccctactcagtcttccagttgtcaacactgcccttctccaagaggagagaatcaacatggtcacagttttctaataaatcgacctggaaaagtcaaatatatgtccaaaccgagttatatccataagaggaagtcttttgggcaacctcaaggctcaccttggccacatggaactgccactttcaccatacagaaaaaagctggtggagccaaagcagcagtaagaaaggctacgcagtctccagttaccttccaaaaaggctctaatgctccgtgtcatagtctgcagcatacaaaaaaacatggaagtgctgggcttgcacctcaaaccaagcaggtgtgtgtagagtatgaaagagaggagactgtggtgagtccctggacgataccttcagaaatccataagattcttcatgagagtcacaattcccttctacaagacttgtctccaactgaagaggaagagccagagcatccttttggggtgggcggtgtggacagcgtgtctgagagcactggcagcatcctcagcaagctggactggaatgccatcgaagacatggtggccagcgtggaggaccagggcctgtctgtccactgggccctggacctgtaa

SEQ ID NO: 695 - DNA, 2988 bp, Homo sapiens
  source 1..2988: mol_type = genomic DNA
atggcgacgcgcggtggggctggggtggcaatggcggtttggtccctcttatccgcccgggccgtgaccgcgttccttctgttgttcctccctcgcttcttacaggcccagaccttctctttccctttccagcagccggagaagtgcgacaacaaccagtactttgatatctccgccctctcgtgtgttccttgtggagctaaccagaggcaagatgcccgaggaacttcatgtgtatgtctaccaggatttcagatgatctctaataatggaggacctgctattatttgtaaaaagtgcccagaaaacatgaaaggtgttacagaagatggctggaactgcatttcttgccctagtgacttaactgccgaaggaaaatgtcactgtcccattggccatattttagtggaaagagacattaatggaacattgttgtctcaagcaacttgtgagctctgtgatggaaatgaaaactcttttatggtagtaaatgctttaggagacaggtgcgtccgatgtgagccaacatttgttaataccagcaggtcctgtgcatgttcagaacctaacattttaacagggggattatgtttcagcagcacagggaattttcctctacgtagaatttcagctgcacgttatggagaagttggcatgtctttaacttcagaatggtttgcaaagtatttgcaatcatcagcagctgcatgttgggtatatgccaatctaacatcttgtcaagctcttggaaatatgtgtgtgatgaacatgaattcttacgactttgccacatttgatgcatgtggactatttcagtttatctttgaaaatactgctggactgagcactgttcattctatttcattttggagacagaatcttccttggctgttttatggagaccagttaggattagcacctcaagtgctcagttctacctctcttcctacaaatttcagttttaaaggagaaaaccagaatacaaaactgaagtttgttgctgcttcctatgatataagaggaaattttctcaagtggcaaactttagaaggaggtgttttacagctttgtccagacacagagacaaggctaaatgctgcttattcatttggaacaacctaccaacaaaattgtgagattcctatctctaagatcttaattgactttcccactcctatattttatgatgtgtaccttgaatatactgatgaaaatcaacatcaatatattttggctgtgcctgtgttaaacctaaatcttcaacataataagatatttgtgaaccaagacagcaactctggaaagtggcttctaactcggcgcattttcttagtggatgcagtaagtggacgagaaaatgacttaggaactcagccaagagtaattcgagttgctactcaaatatcactgagtgtccaccttgtacccaacacaataaatggaaacatctaccctcccttaatcaccattgcctacagtgacattgatatcaaagatgccaacagccagtctgtgaaggtttctttctcagtcacatatgaaatggatcatggagaagcacatgtccagacagatattgctttgggtgtattgggtgggctagctgttttagcatctcttttgaagacagcaggatggaagaggcgcattgggagtcccatgattgatttacagacagttgtgaaattcttggtgtactatgctggtgatctggccaatgttttctttatcatcacagtgggaacaggtctttactggcttattttcttcaaagcacagaagtctgtgtctgttttgctgccaatgccaattcaggaagaacgttttgtcacttatgttggatgtgcctttgctctgaaggcactacaatttttgcataagctcatatcccagattacaatagatgtattctttattgattgggagcgacctaaaggaaaggttcttaaagctgttgaaggtgagggtggtgtacgaagtgccactgttcctgtaagcatatggagaacatattttgtagcaaatgaatggaatgaaattcagactgtgagaaaaattaattcactctttcaagtacttactgtcctcttctttttggaggttgtgggattcaagaacttagcattaatggactcatcttctagtctttctagaaacccacctagctacatagctccttatagctgcattttgagatatgcagtgtctgctgctctttggctagccattggaattatacaggtcgtgttctttgctgtcttttatgagagatttatagaagataaaattcgacagttcgttgatttatgctctatgagtaatatatcagtgtttctgttatcccacaaatgttttggatattacattcatggtagatcagtacatgggcatgcagatactaatatggaagaaatgaatatgaaccttaaaagagaagcggaaaatttgtgtagccagagaggtttggtacccaacacagatggtcagacttttgagattgcaatttctaaccagatgagacaacattatgacagaattcatgagacactaataaggaaaaatggtcctgctagactactgagttcatcagcaagtacttttgagcagagtataaaagcatatcatatgatgaataaatttcttggctccttcattgaccatgttcataaggaaatggattactttataaaagataagttgcttcttgaaagaattcttggaatggaattcatggaaccaatggaaaaaagcatcttttacaatgatgaaggttattctttcagcagtgtcctgtattatggaaatgaagctactcttcttatttttgatctgctgttcttctgtgttgtggatttggcttgccaaaattttattttagcatccttccttacatatctacaacaagagatttttagatatatccgtaatacagtaggacaaaagaatttggcatccaaaacattggtggatcaaagatttttgatttaa

SEQ ID NO: 696 - DNA, 2076 bp, Homo sapiens
  source 1..2076: mol_type = genomic DNA
atgaacgcggcggtggtgaggcggacgcaggaggcgctggggaaagtgattcggaggccgccgctgaccgagaagctgctgagcaagcccccgttccgctacctgcacgacatcatcacggaggtgattagaatgactggtttcatgaagggcctctacacagacgccgagatgaagtctgataatgtgaaggataaagatgcaaaaattagcttcctacaaaaggccatagacgtggttgtaatggtgtcgggagagccactgttggccaaaccagcccgaatcgtggcggggcatgagcctgaaagaacaaacgagctgctccagataattggaaaatgctgtctcaacaagctctctagtgacgatgcggtgcggagggttttagctggagagaagggagaagtgaaaggccgggcctcactgacctcaagatctcaggaattggataataagaatgtgcgagaagaagagtccagagttcacaaaaatacagaggatagaggagacgctgaaataaaagagagaagtacaagcagagatcgaaaacagaaggaagaattgaaagaagaccgcaagccaagagaaaaggacaaggacaaggagaaggccaaggagaatggcggaaacagacacagagaaggggagagagagagagccaaagcccgggccaggccagacaacgagcgacagaaagacagaggcaacagggagcgggacagagactccgagcgcaagaaggagacagagagaaagagtgagggggggaaagagaaggagagactgagagacagggaccgagagcgcgaccgggacaaagggaaggacagggacagacggagagtgaaaaacggggagcactcctgggacctggacagggagaagaacagagagcatgacaaacctgagaaaaagtcagcaagctcaggggagatgtctaaaaagttatcagatggaacttttaaagactccaaggctgaaacagagactgagatttccactagagcttccaagtcattgacaacaaaaacatcaaaacggcgatccaaaaattcagtggaaggaaggaaggaggataatatttcagctaaaagtttagactccatagtgtctggaataaataatgagccaaatcaggaaacgacaacatcagaaataggaacaaaagaagctaatattaactcaactagtatttcagatgataattcagctagtctgcggtgtgagaatattcagcccaaccccacagagaagcagaaaggtgactccaccagtgatgcagaaggagatgctggacctgctggccaagataagtctgaggtgccagagactccagaaattcctaatgagctttcatccaacatcagaagaattcctcggcctgggagtgcaagaccagcccctccccgggtcaaacggcaagacagcatggaggcgctacaaatggataggtcagggagtggtaaaaccgtttcaaatgtgattacagagtcacacaattctgacaatgaagaggatgatcaatttgtggtggaagctgcccctcagctctctgaaatgtcagaaattgaaatggtaacagcagtggaactagaagaagaggagaagcatggtggacttgtgaaaaaaattttggagacgaagaaagattatgagaaattgcagcagtcacccaaacctggggagaaggagcgatctctctttgagtcggcatggaagaaggagaaggacatcgtttccaaggagatagagaagctccgcacgtccatccagaccctgtgcaagagcgcacttcccctggggaagatcatggactacatccaggaagacgtggatgccatgcagaatgagctgcagatgtggcacagcgagaacaggcagcacgccgaggccctgcagcaggagcagaggatcacagactgtgccgtggagcccttaaaggctgagctcgcggagctggagcagctgatcaaagaccagcaagacaagatctgtgctgtgaaggccaacatcctcaagaatgaagaaaaaatccagaaaatggtatatagtatcaatttgacttcgagaaggtga

SEQ ID NO: 697 - DNA, 1803 bp, Homo sapiens
  source 1..1803: mol_type = genomic DNA
atggccagcaatcacaaatcttcagcagctcgccctgtttcaagaggtggagttgggttaacaggaaggcctccttctgggatacgacccctatcaggaaatattcgagtggcaactgcaatgccacctgggacagcaagaccaggttctcgtggttgtcccatagggactggtggagttctgtcttctcaaatcaaagttgcccatcgccctgtaacacaacaaggtttgactggaatgaaaactgggacgaaaggtccccagaggcaaattttagacaaatcttactatcttgggcttcttagaagtaaaataagtgaacttacaactgaagttaataaacttcagaagggaatagaaatgtacaatcaagagaattcagtatatttgtcatatgaaaagagggctgagactttagctgttgagataaaagagcttcaaggacaactagcagactacaacatgttggtagataaacttaataccaacactgaaatggaagaagtaatgaatgattacaatatgcttaaagctcaaaatgatcgagaaacacaaagtttggatgtcatatttactgaaagacaagcgaaagaaaaacaaatcagaagtgtcgaagaagaaattgaacaggaaaaacaagcaacagatgacattatcaaaaatatgtcttttgaaaaccaagtcaagtacctagagatgaaaaccacaaatgagaaactgttacaggaattagatacacttcaacaacaattggattcacagaacatgaaaaaagagagcctggaagcagaaatagctcactcccaggtgaaacaggaggcggtattgctgcatgaaaaactttatgagttggagtcccatcgagatcaaatgattgcagaagacaaaagcataggatctccaatggaagagagagagaaattacttaagcagattaaagatgataatcaggaaatagccagcatggaaagacagttaacagatacaaaagaaaagataaatcagtttattgaagaaattagacaacttgacatggatttagaggaacaccaaggtgaaatgaaccagaaatacaaggagctaaagaaaagggaggaacatatggacacttttattgagacttttgaggaaacaaagaatcaggaactgaaacgaaaggcacagatagaagccaacattgttgcactcttggagcactgcagtcgaaatataaatcgtatagaacagatatcctctatcaccaatcaagagctaaagatgatgcaggatgacctcaattttaaatctactgaagtgcagaaatcacaaagtacagctcagaatttgacttcagacattcaacgtctgcagttggatctgcagaaaatggagcttctagaaagtaagatgactgaagaacagcattctctaaaaagcaaaattaagcaaatgacaactgatctggagatatataatgatttgccagctttaaaatcatcaggtgaagaaaagataaagaaattacatcaggagagaatgatattatcaacccacagaaatgcctttaagaaaataatggagaagcaaaacatagagtatgaggcactaaaaacacaattgcaagaaaatgagacacattctcagcttacaaatttggagagaaagtggcaacaccttgagcaaaataattttgcgatgaaagaattcatagcaaccaagagtcaagagagtgattaccagccaattaagaaaaatgtgaccaagcagattgcagagtacaataaaaccatcgtggatgctttacatagcaccagcggaaactga

SEQ ID NO: 698 - DNA, 4203 bp, Homo sapiens
  source 1..4203: mol_type = genomic DNA
atgatggcttcattccagcgctccaatagtcatgacaaagtaaggagaatagttgcagaggagggtcgtacagcaagaaacctaatagcttggagtgttccactagaaagcaaagatgatgatggaaaacctaaatgtcaaactggtggaaaatctaagaggaccattcaaggcactcataaaactactaaacagagtactgcagtggactgtaaaataacatcgtctacgactggagataaacactttgataaaagtcccactaaaacaaggcaccctcggaaaattgatctaagagctcgatactgggcatttctttttgataatcttcgccgagcagtagatgaaatctatgtaacttgcgaatcagatcagagtgtggtcgaatgtaaggaggtgctaatgatgctggataactatgtaagagatttcaaagcattgattgactggattcagcttcaggaaaagctagagaagacagatgctcaaagcagaccaacatcattggcatgggaagtaaagaagatgtctccgggacgccatgtgattccaagtccatcaacagatagaataaatgtaacatcaaatgctcgacgaagcttaaattttggaggttcaactggcacagtgccagctcctcgtctggctcccacaggtgtcagttgggctgacaaggtaaaggctcatcatacaggctctactgcttcttcagaaataacacccgcccagtcttgcccaccaatgacagtgcagaaggcctcacgcaaaaatgaacggaaagatgctgaaggatgggagaccgttcagagaggaaggcctattcgttctcgatcaacagcagtgatgccaaaagtttcattggcaacagaagccacaagatcaaaggatgacagtgataaagaaaatgtatgtcttttacctgatgaaagcatacagaaaggtcaatttgttggagatggaacttctaatactatagaatctcatcccaaagactcattacactcttgtgaccatcctcttgccgaaaaaacccagttcacagtgagtacattggatgatgtgaagaattctggcagtattcgagacaattatgttcgaacttctgaaatatctgctgtccacattgatacagagtgtgtttcagttatgctgcaagctggtacacctcctttacaagtaaatgaagaaaaatttccagcagagaaagcaaggatagaaaatgaaatggacccttcagatatttcaaattccatggcagaagtccttgctaaaaaagaagagctagcagatcgtctagaaaaggccaatgaagaagccattgctagtgctattgctgaagaagaacagttaactagagaaattgaagctgaagaaaacaatgatattaacattgaaactgacaacgacagtgatttttctgccagcatgggcagtgggagtgtttctttctgtggtatgtccatggactggaacgatgtccttgcagattatgaagctcgtgagtcttggcgccaaaatacatcctggggggacattgtagaagaagaacctgctagacctccagggcatggaattcacatgcatgaaaaactttcttcaccctctcgtaaaagaacaattgcagaatctaagaagaaacatgaagaaaaacaaatgaaagcacagcagctaagggaaaagttacgcgaagagaaaacattgaagcttcagaaattgttagaaagggagaaggatgtccggaagtggaaggaagaattgctagatcaacgacgcaggatgatggaagaaaaattacttcatgctgagtttaagcgagaagtgcagttacaagcaattgtgaaaaaagcacaagaagaagaagctaaggtaaatgaaattgcctttataaatacccttgaagcccagaataaacgtcatgatgttttatcaaaattgaaggaatatgaacagaggcttaatgagctacaggaagagcgtcagagaagacaggaagaaaagcaagcacgtgatgaagctgtgcaggaacgcaagagagctctagaggcagagcggcaggcccgtgtagaagaattgttaatgaagaggaaagaacaagaagcccgaattgaacaacagaggcaagaaaaggaaaaagcccgtgaggatgcagcccgggaaagagctagagacagggaagaacgattggcagcactcacagctgctcaacaagaagctatggaagagttacagaaaaaaattcagctcaagcatgatgaaagtattcgaaggcacatggaacagattgaacaaagaaaagaaaaagctgctgagctaagcagtgggcgacatgcaaatactgattatgcccccaaactgaccccttatgaaagaaagaagcagtgttctctctgcaatgtcctgatctcttcagaggtatatctttttagccatgttaaagggagaaaacaccagcaagccgtgagagagaataccagcatccaggggcgtgaactgtcagatgaagaagtggagcatctttccttgaagaagtacattattgacattgtggttgaaagtacagctccagcagaagctttgaaagatggagaagagcggcaaaaaaataaaaaaaaagccaaaaagataaaagcccggatgaacttcagggctaaggaatatgagagtttaatggaaaccaaaaattctggctctgattcaccttataaagcaaagcttcagcgattagccaaagatcttctaaaacaagtacaagttcaagacagtggctcatgggcaaacaataaagtgtctgctttggatcggaccctaggagagatcactagaatactggaaaaagagaatgtggcagatcagattgcatttcaagctgctggtggattaacagcccttgaacacatccttcaagcagtagtcccagccacaaatgtgaacacagttttaagaattcctcctaagtctctctgcaatgcaatcaatgtttacaacctcacctgcaataactgttcagaaaactgcagtgatgttctgtttagtaacaagattaccttcttaatggacctcctgatacaccagttgacggtttatgttccagatgaaaataatactattttggggagaaatacaaataaacaagtttttgaaggcttgacaactggacttctcaaagtcagtgctgtggttttgggctgcctgattgccaatcgaccagatggaaactgccagccagctaccccaaaaataccaacacaggaaatgaaaaacaaaccctcacaaggtgatccttttaacaatcgagttcaggaccttatcagctacgtggtgaacatgggtctgattgacaaactgtgtgcctgcttcctctcggtgcaaggcccagtggatgagaatcccaagatggccatatttctgcagcatgccgcaggactcttacatgcaatgtgtacactgtgctttgctgtcactggaaggtcatacagcatatttgacaataatcgccaggatcccacagggctgacagctgctcttcaggcaaccgacctggctggagttcttcatatgctctactgtgtcctcttccatggcaccatcttggaccccagcactgccagtcccaaggagaattacactcaaaataccatccaagtggccattcagagtttacgtttcttcaacagctttgcagctcttcatctgcctgcttttcagtctattgtaggggcagagggcttgtcccttgcattccggcacatggccagctccctgctgggccactgcagccaagtctcctgtgaaagcctccttcatgaggtcatcgtctgtgtgggctacttcactgtcaaccacccagataaccaggtgatcgtgcagtccggccgccaccccacagtgctgcagaagctctgccagttgcccttccagtatttcagtgacccacggctgatcaaagtactgttcccttcacttatcgctgcttgttacaacaaccatcagaacaagatcattctggagcaagagatgagctgtgttttactggccactttcattcaggatttggcacagactccaggtcaagcggaaaaccagccttaccaacccaaagggaaatgccttggttcccaagactatcttgagctggctaacagatttcctcagcaggcctgggaagaagctcgacagtttttcttgaaaaaagagaaaaaataa

SEQ ID NO: 699 - DNA, 2067 bp, Homo sapiens
  source 1..2067: mol_type = genomic DNA
atggctgcagaaatcgactttctgagagagcaaaatcgaagactaaatgaagattttaggcggtatcaaatggaaagtttttccaaatattcatctgtacagaaagctgtctgccaaggagaaggagacgacacatttgaaaacctagtatttgaccaaagctttttagctcctcttgttactgagtatgataaacacctaggagaactaaatgggcagctgaaatattaccagaaacaggtgggtgagatgaaattacaacttgaaaatgtcatcaaggaaaatgaaaggttgcacagtgaattaaaagatgctgttgaaaaaaaattggaggcctttcccctgggcacagaggtaggaactgacatatatgcagatgatgaaacagtcagaaaccttcaagaacaattgcagctagccaatcaagaaaaaactcaggctgtggaactctggcagactgtttctcaggagttggacagactacacaagctttaccaggaacatatgactgaggcccagattcatgtatttgaaagtcaaaaacaaaaggatcagctatttgattttcaacaactgaccaaacaacttcatgttactaatgagaacatggaagtgactaaccaacagtttctgaaaacagtaactgaacaaagtgtgataatcgaacaactccgaaaaaaacttaggcaagccaaattagagctgagagttgctgtagcaaaagtggaagagttaactaatgtgactgaagatctgcagggacagatgaaaaagaaggagaaggatgtggtgtctgcccatggaagagaggaagcatcagataggcgtttacagcagttacagtctagtataaaacaattagaaataagattatgtgtgacaatccaagaagccaaccaattaagaaccgaaaatacacatctggaaaaacagaccagagagctacaagcaaagtgcaatgaattagaaaatgagagatatgaggctattgtaagagccagaaatagcatgcaactcttagaagaagctaaccttcaaaaaagtcaggctctacttgaggagaagcaaaaagaagaagacatagagaaaatgaaagagacagtttctcggtttgtacaagatgctaccataagaaccaagaaagaagttgcaaacaccaaaaaacaatgtaatatacaaatttctcgattaacagaagaactttcagcccttcaaatggagtgtgctgaaaaacaaggccaaattgaacgagtcattaaggaaaaaaaagcagtggaagaagaactagaaaagatttaccgtgaaggcagaggaaatgagagtgattacagaaaactggaagaaatgcaccaaagattcctggtttcagagcgttcaaaagatgatcttcagctaagacttacgagagcagaaaatagaataaaacaacttgaaactgactcctcagaagaaatatcacgttaccaagaaatgattcagaaacttcaaaatgtattggagtctgagagagagaactgtgggcttgtcagtgaacaaaggctaaaacttcagcaagaaaataaacagttacggaaagagactgagagtttaaggaagattgccctggaggctcaaaaaaaagccaaagtaaagatcagtacaatggaacatgaattttcaataaaggaacgtggatttgaagttcaattgagagagatggaagacagtaatagaaattccattgttgaactgaggcatctcctagcgactcaacagaaggcagccaataggtggaaagaagaaacgaagaaacttactgaaagtgcagaaattagaatcaataatctaaagagtgagctgagtcgacagaaacttcatacccaagagctgctttctcagctggaaatggcaaatgaaaaggtagctgagaatgaaaagctaattctagagcatcaagaaaaagccaacagacttcaaaggcgtctaagtcaggcagaagagagagctgcttcagcttcccagcagctcagtgtgattacagtgcagagaagaaaagcagcctccctgatgaatctggaaaatatttaa

SEQ ID NO: 700 - DNA, 4602 bp, Homo sapiens
  source 1..4602: mol_type = genomic DNA
atgccagtgaagagacttcgtgaggtagtttctcaaaatcatggagatcatttggttttgctgaaagatgagttgccctgtgttcctccggcattgtctgcaaataaacgtcttcctgttggaacggggactagtttgaatggaacatcacgtggttcatcagacttaacttctgctagaaattgttaccagcctctattagaaaatcccatggtgtcagaaagtgatttttctaaagacgttgcagtgcaagtgttgcctttggataaaatagaagagaacaacaagcaaaaagcaaatgacatcttcatttctcagtatacaatgggacagaaagatgctctaagaacagttttaaagcaaaaagctcaaagcatgcctgtttttaaggaagtaaaggtacatctgttagaagatgcaggcatagagaaggatgctgttactcaggagactagaatttcacccagtggaattgattcagctacaaccgtggctgcagcaactgctgctgccattgcaaccgcagctccgttgataaaggtgcagagtgatttggaagcaaaagtcaattctgttacagaattacttagtaaattacaggagactgataaacacctgcaacgtgttacagagcagcaaacaagcattcagaggaaacaagagaaattacattgtcatgatcacgaaaagcaaatgaatgtgtttatggagcagcacataaggcatcttgaaaagttacaacaacaacaaatagatattcagactcattttattagtgctgcactcaagactagtagttttcagcctgttagtatgccctcctccagagcagtggaaaagtattccgtaaaaccagaacaccctaatcttggtagctgtaatccatctttatataacacatttgcttccaaacaagcacctttaaaagaagttgaagatacgagttttgataaacagaaatctcctttggagacaccagcacctcgcagatttgctcctgtacctgtttcaagggatgatgaactatcaaagagggaaaatcttttggaagaaaaagaaaatatggaagtgtcgtgtcacagaggaaatgtaagactattggaacaaattttgaataataatgattctttgacaagaaaaagtgaatcatcaaacaccacctcactaactaggtcaaaaataggatggactcctgagaaaacaaacagatttccttcctgtgaagagctagaaacaactaaagtgactatgcagaagtctgatgatgttcttcatgaccttggccaaaaagagaaagaaacaaatagcatggtccagccaaaagaatctctgagtatgttgaagcttccagatcttccacagaattctgttaagcttcaaacaaccaatacaacaagatctgtattgaaagatgctgagaagattttgagaggagtacaaaacaataaaaaagtacttgaagaaaacctggaagctattattcgtgcaaaagatggagctgccatgtattcgcttatcaatgctttatctaccaacagagagatgtcagagaaaattaggatcagaaagacagtggatgaatggattaaaactatttctgcagaaattcaggatgaactgtcaagaacagattatgaacaaaaaagatttgatcagaagaatcagagaaccaagaaaggtcagaatatgactaaagatattagaaccaacacacaagataaaactgtcaacaaatctgtaattccaagaaaacattctcaaaagcaaatagaagagcattttagaaatctacctatgaggggcatgcctgcttcaagtttacagaaagagagaaaggaagggcttttgaaagcaaccacagtaatacaagatgaagattatatgttacaagtctatggaaagccagtttatcagggccatcgaagcactcttaaaaaaggaccatatctcagatttaattctccatctcctaagtccagaccacagagaccaaaagtaatagaacgagttaaaggcactaaggtaaagtcaataagaacacagactgacttctatgcaacaaaacctaagaagatggattctaaaatgaaacattctgttcctgtgttacctcatggcgatcagcaatatttgttcagcccaagtagagaaatgcctactttttcaggtacattggaaggtcatctgattcctatggcaattcttttaggacaaacccaaagtaatagtgataccatgccacctgctggagtgattgtcagcaagccacaccctgtaactgtgactacttctattcctccatcatctcgaaaagtagaaactggagtaaagaaacctaacatagccattgtagaaatgaagtcagaaaaaaaggatcctcctcagcttactgtgcaggtattacccagtgtagatattgacagcatttcaaatagtagtgctgatgtcctttcacctctgtctagccccaaagaagcatctcttcctcctgtgcaaacttggataaagactccagaaattatgaaggtagatgaagaagaggtgaagtttccaggaactaactttgatgaaataatcgatgtcatacaggaagaagaaaaatgtgatgaaattccagactctgaaccaattctggagtttaacagaagtgttaaagctgattctacaaaatataatggtcctccatttccgccagttgcttctacttttcagcccactgctgatattctggataaagtaattgagagaaaagaaacactggaaaatagcttaattcaatgggtagagcaagaaataatgtcaagaattatctctgggctctttccagtccagcaacagattgcacctagtatcagtgtttcagtcagtgagacaagtgaaccactgacttctgacattgtggaaggaacaagcagtggcgccctccagctttttgttgatgctggtgttcctgtgaactcaaatgtgattaaacattttgttaacgaagctcttgctgagaccattgctgtcatgctgggtgacagagaagcaaagaagcaaggtcctgttgctacaggtgtttctggggatgcttcaacaaatgaaacatatttgccggcaagagtgtgcaccccactgcctaccccacagcctacgcctccttgctcaccttcatcacctgctaaggagtgtgttttggtaaagactccagattcttctccctgtgattcggatcatgatatggcttttcctgtgaaagaaatatgtgctgaaaaaggagatgatatgcctgccatcatgcttgttaatactccaacagttacccctactactacacctcctccagcggcggcagtttttaccccaactttgtcagatatttccattgataaattgaaggtatcaagcccagagcttcccaagccatggggtgatggagacctgccactggaagaagagaaccctaactcacctcaagaagaacttcatccaagagctattgtaatgtctgtggctaaggatgaagaaccagagagtatggatttccctgctcagcctccacctccagagccagttccctttatgccatttcctgccggcaccaaggccccttccccctcacagatgccaggttctgattcatcaacactggagagcacattgagtgttactgtcactgaaactgaaactttagataaacccatctctgaaggagagattttatttagctgtggtcaaaaattggcccccaagattttagaagatataggactgtacctgacaaaccttaatgatagcttatccagcactctgcatgatgccgttgaaatggaggatgatcctcctagtgaagggcaagtgattaggatgtcccataaaaaatttcatgcagatgcaattctttcttttgctaaacaaaaccaggagtcagcagtttcccagcaagcagtctatcattcagaggacttggaaaacagtgtgggtgaacttagtgaaggacaaagaccccagctaacagcggcagcagagaacatcttaatgggacattctctctatatgcagccacctgtcactaatacacagtctttggatcaacaatgtgatcctaaaccattatctcggcaatttgacacagtttcaggtagtatttatgaagattcatgtgctagtcatggtccaatgagtttgggagaattggagttggagccaaattctaagctggttcttcccacaacacttctgacagcacaagaaaatgatgttaatttaccagtagccgctgaagatttttcccagtaccaactaaagcaaaatcaggatgttaagcaagttgaacacaaaccatcacaaagttacctacgtgttagaaataaatctgatattgcaccttcacagcaacaagtttcaccaggtgatatggatcggacacaaattgagcttaatccgtacctcacatgtgtattttcaggtgggaaagcagtgccactctccgcttcacagatgccccctgccaagatgtcagtgatgctgccgtcagtgaacctcgaggactgctctcagtctctgagtctcagcacaatgcaggaggacatggagtcttcgggggcagataccttctga

SEQ ID NO: 701 - DNA, 2094 bp, Homo sapiens
  source 1..2094: mol_type = genomic DNA
atgggcttccagcctccggccgctcttcttttgaggcttttccttctgcagggcatcctgaggcttctgtggggggacctggctttcatccctccttttatccgaatgtccggccctgcggtcagcgcgtccctggtcggagacaccgagggtgtgaccgtgtccctggcagtgctgcaggacgaggcgggaatattgccaattccgacgtgtggagtgctgaacaatgagacggaagactggagcgtgactgtgatccccggtgcgaaggtgttggaagtgacagtgaggtggaagagaggtctggactggtgttcctccaatgagacagattccttctcagagtccccctgtatcctccagacccttctggtttcagcatctcataattcatcctgttcagcacatctactcattcaagtggaaatttatgccaactcttctctgacccataatgcctcagagaacgtgactgtcattcctaaccaggtgtatcagccccttggcccttgtccttgtaatttaacagctggagcctgtgatgttcgctgctgctgtgaccaggaatgctcatcaaatttaacaacgctgttcagacggtcctgcttcaccggcgtgtttggaggagacgtcaatcctccttttgatcagctctgctctgctgggacgacgacacgtggtgtccccgattggtttccctttctgtgtgtgcagtccccccttgccaacacacccttccttggttacttctatcatggtgctgtttcccccaaacaggactcttcctttgaagtatatgtggatactgacgcaaaagactttgcagactttggttacaaacaaggagatcccattatgactgtaaagaaggcatattttactattccgcaggtgtccctggctgggcagtgtatgcagaacgccccagtggcatttcttcacaattttgatgttaaatgcgttactaatttggaactataccaagaacgagatggtattatcaatgcgaagataaagaatgttgccttaggaggcatagttacaccaaaagtgatctatgaggaagcaactgacctagacaaattcatcaccaatacagaaactcctttaaataacggatcaacccctagaattgtgaatgtggaagaacattatattttcaaatggaataataataccatcagtgaaataaatgttaaaatttttagggcagagattaatgcccaccagaaagggataatgacacagagatttgtagtaaaatttttaagctataatagtggtaatgaagaagaattatctggaaatccaggttaccaacttggcaagcctgtccgagctctaaatatcaacaggatgaataatgtcacgactttacatctttggcaatcggctggaaggggtctgtgtacatcagcaactttcaaacccattttatttggagaaaatgtactctctggatgcctgttagaagtcgggattaatgaaaattgtactcagctcagggagaatgctgttgaaagacttgattcattaatacaagcgactcacgttgcaatgagaggcaactccgattacgctgatcttagtgatggctggctcgaaataatacgtgtagatgcccctgatccaggtgcagacccgctggctagcagtgtgaacggcatgtgcctggatattcctgctcacctgagcatccgcatcctcatctcggatgctggcgcggtggaagggattactcagcaggagatactcggtgtagagacaaggttctcctcagtgaactggcagtaccagtgtgggcttacctgtgagcacaaggccgaccttctccctatcagtgcatccgtccagtttattaaaattcctgcacagttaccccaccccctgacaagattccagatcaattatacagagtatgactgcaacagaaatgaggtgtgttggccgcagcttctatatccatggactcagtattatcaaggggagctgcattctcagtgtgttgctaagggcttactgttgctgttgttcctcacattggccttgttcctcagcaacccctggaccagaatatgcaaagcctatagttag

SEQ ID NO: 702 - DNA, 1287 bp, Homo sapiens
  source 1..1287: mol_type = genomic DNA
atgttcagtctgatggccagttgctgcggctggttcaagcggtggcgggagcctgtcagaaaggtgactcttttgatggtgggacttgataatgctggtaaaaccgcaacagcaaagggaatccaaggagaataccctgaagatgtagctcctactgttggattttcaaaaattaaccttagacaaggaaagtttgaagtcaccatctttgacttgggaggtggaataagaattcggggaatctggaagaattactatgctgaatcctatggggtaatatttgttgtggattccagtgatgaagagagaatggaagagacaaaagaggctatgtcagaaatgctaagacatcctaggatatcgggaaagcctatattggtgttggcaaataaacaagataaagaaggagctttaggagaagctgatgtcattgaatgtctatctctggaaaaattggtcaatgagcacaagtgcctgtgtcagatagaaccatgttcagcaatctcggggtatggaaagaaaattgacaagtccattaaaaaaggcctttattggctgctacatgttattgcaagagactttgatgccttaaatgaacgcatccaaaaagagacaacagagcagcgtgctcttgaggaacaagagaaacaagaaagagctgaacgagtgcgaaaattacgagaagaaagaaaacaaaatgaacaggagcaggctgaactcgatggaaccagtggtctggctgagttggacccagaaccaacgaatcctttccagccaatagcatctgtaatcattgagaatgaaggaaaacttgaaagagagaaaaaaaaccaaaaaatggagaaagacagtgatggctgccacctgaaacataaaatggagcatgagcaaatagagacacaaggccaggttaatcacaatggccaaaaaaataatgaatttggactagtagaaaattataaggaggcattaacacagcagttaaagaatgaagatgagacagaccggccatcattggaatcagctaatggtaaaaagaaaactaagaaactaagaatgaaaaggaaccaccgggtagaaccacttaatatagatgactgtgctcctgagagtccaacgccacccccaccccctcctcctgttggctggggaacccctaaagtcactagacttccaaaacttgagcctcttggtgaaacacatcataatgatttctataggaagccactgcctcccctggctgtgccacagcgacctaacagtgatgctcatgatgtgatctcataa

SEQ ID NO: 703 - DNA, 615 bp, Homo sapiens
  source 1..615: mol_type = genomic DNA
atggcgaccgcgagtcctagcgtctttctactcatggtcaacgggcaggtggagagcgcccagtttccagagtatgatgacctctactgcaagtactgctttgtgtacggccaggactgggcccccacagcgggtctggaggaggggatctcacagatcacatccaagagccaagatgtgcggcaagcactggtgtggaacttccccattgatgtcacctttaaaagcaccaacccctacggctggccacagatcgtgctcagcgtgtatggaccagatgtgttcgggaacgatgtggttcgaggctatggggccgtgcacgtgcccttctcacctggccggcacaaaaggaccatccccatgtttgtcccagaatctacgtctaaactgcagaagtttacaagctggttcatggggcggcggcccgagtacacagaccccaaggtggtggctcagggtgaaggccgggaagtgacccgtgtccgttctcagggctttgtcaccctcctcttcaacgtggtgaccaaggacatgaggaaactgggctatgacactgggccttctgatacacagggtgtgttggggcccagcccaccccagagcttcccccagtga

SEQ ID NO: 704 - DNA, 528 bp, Homo sapiens
  source 1..528: mol_type = genomic DNA
atggctgaggtgcacgtgatcgggcagatcataggggccagcggtttctcggaaagtagcctcttctgcaagtggggcattcacacaggggcggcatggaagctcctgtcaggcgtgcgggagggccaaacgcaagtggacaccccgcagataggggacatggcttactggtcccaccccatcgacctgcacttcgccaccaaaggtcttcaaggctggccccggctccatttccaggtgtggtcccaggacagctttggccgctgccagcttgcaggctatggattttgccatgtgcccagtagcccgggcacccaccagctggcctgccccacgtggcggcccctgggcagttggcgagaacagttggcacgggctttcgtgggtggtgggccgcagctgctgcatggggacaccatctacagtggggccgaccgctatcgcctgcacacagctgctggtggcaccgtgcacctggagatcggcctgctgctccgcaacttcgaccgctacggcgtggagtgctga

SEQ ID NO: 705 - DNA, 7062 bp, Homo sapiens
  source 1..7062: mol_type = genomic DNA
atgaaacaacgaaaaggccaagggtctgggggcagccgtgggcgcaaaaaaagaggtttaagtgacatttctccatctacaagcctgccacctctggttgaaggccagctacgctgttttctaaaacttactgttaatagagtcatatggaagattgcaaagcctcccacttgtgtacttgtccgagtgagatggtggggagaaacatcagatggaaccctcttttgtcccagggatgcattgcagactgaaccaaaagctgtgagaacaactacacgttacgctattcgttgtggtccaaaacagtttacctcttatctaacagatatggctgtgctggtgctggaagtaatcaccaaacttgatggtcttccaattggtagagttcagatcaatggactagctcaactttctccaacccatcaaatcaatggattttttaccattgtttcatcaacgtctaagaaacttggagaactccaggtctcacttgccctggaacctctgtcagaaacttacgacagctaccatccacttcctaccactgacatgacagaaaatgtgcttttatctaagcagggattcagagagaatactgaacccagcagtacccagtttcaggttccatcaaggcctcgcgacatacataccatcaaaattgatggaaaagagttagcagccaacagcagtagatcaaccactccgaggggaaaagaccatgtatgctttgcagagaaccctgatacaataaaggattcttcctttggactacagcacagtcttaattcaggacagagtttagagtctgtaactctgaaaggcagagctccacggaagcagatgtcccttctgaacagttctgaattccagcctcaaattagaacagttgccaagagtcacagtgactcatgcattctttcttcaaacaacctccctaccaaggatcttctttcagctctgttagaacaaggcaataaactgcgtaatgccatggtgatttctgcaatgaaatcaagcccagagaccagcatgttgttggaccaagttcatcctcctattaatgaagattctcttagagcatcaacacagatcagagccttttctaggaatcggtttaaagaccacattgaagatcacctcctcccttcaactgagaatacattttggagacatgacacaaaagctgataccagagctatacagctgctattaggcagtgctgaattatcccaaggcaatttctgggatgggctaggctctcctccagattccccatctcctgggagtgatgtgtattgcatcagtgagctgaatgaccctcagtatgaccagagtcttctggagaatttattttatacagcacctaaatctgataccagcatcagtgatttcctcagtgaagaggatgatatcgtcccttctaaaaaaataagccagtcaacagctcttgccagatcatctaaggttctggagtcaagtgatcataagctgaagaagaggtcagcaggcaagagaaatagaaatttggttgaacaacagatgctctcagaaactccagaagatgcccaaacgatgacactaagtgtggatagactggcccttttgggtagaacacattcagtcagaatcatcatcgaaaccatgggagttcctccagatagtcctcagatgacccctggcaaaaaaagctatgctggtccaccacctaaggtgactacagcaaaaaagcgcactttctttgtagaatatcactttcctgtgggcttttcggaaagcggattgggaaagacagctttgatcactgaggttgttcgactcgcctccagtaaaattacagatggaaaggtgaagttccagcagcgatttgtgtttccagtacagtttggtggcccaatgatagagcactggtggaattccaacctcactttccaaatttatgtaaagaaaactccacagaaaaagccagaagtcattggatctgtgtcactttctttgcgagctgtcattcaatcagagctgctttctttcagtgatcagcttccagtgcaacaagaaaatggtcagtctccatttggccccctcaaggtaaccatggagcttattacagataacaaagatttcactggtatcaatactaagttaagtggcaacacccattataccccactttgtgctcctacaagtccaaataaggcactaccagaacttaaccaagatatgacctgtaccaaaaatccacaaaacttaaaccaaattcatgaggaaactgcaaagaaagcacagaacttggtgctccccaaccgaaagtcaccaagccctgtagcaccacatccttcaaccttcgtagctacgccagcctcccataatttagtcaatcagacaaatgggacaacaaaagagagtgctttgctgttgcatgtgctgttgatggtgccagatgggaaagattttattagtggagaatctgagaaacaatcaccatgcaatgtttatttaaattgtaaactcttcagcacagaggaagtcaccagatctgtcatcgcatggggcacaacacaaccggtctttaacttttctcaggtgattcctgtctctctgtcttccaaatacctggaaaggcttaagaacaatgtgatggtaattgaaacttggaataaggtgcggagcccaggacaggacaagctgctcgggctggtgaaacttcccctccaccagttttacatgtcattcaaagatgctaagatttctcgcctgctgctggatgcccagtacccagttgttgctgtcgacagctacatgcctgtgattgatgtgttttcaggccaccaaaatgggagtcttcgagtctttttagctatgggttcttcaaatcaaataatggcactacaaagattaaagaatgaagaaggaacactccctcccttcagccctaggccagcccatttcctggaccagccaactgcagcatctgttgctatggcagaggaccgaggaaatggactgatggagcactgctttgagatccatatagagatggttaaagggctagcccctcttcaggcaacagtctggggagaagcagattgttatgtccagtactactttccagttcaacactctcaatccagtgtgctgaaaggacctgagttccttgaaaatggaattactctgaagcccttcagaactgcaaccacactctgtgttccagatcccatctttaatagtgaacaccatcactctctcctgttgccagctgaggttccagtgcaaaggctcctactaagtgctttctctgcacagggcctcgtgcctggaggtggagtccagtttgaaatctggtgcagatactattatcctaatgtgagagaccagaaggtcgccaaaggaaccttgccattatcaaggatctgtgctatggtaaccacccagcatcgtgaggatgtgggaatacagacctttaatctccctttaacccccaggattgagaacaggaaagaattgaggaaccagtcatcaggtttactggatgtgggcctaaggtacaggcgtagtccaagaacagcagagggagttcttgctgcccgaactgtttccatctcagtccagattatcagagcctgtggtctgcaagcagcagccaaggctttggctgaacgggaacccgctctacagtttagtgccacagtcggggtcaatgcctctgtcaccactcatctctccttcctgccccagggagaacagcgccgaacccaccctgtggcctgttctttctgccctgagttctcccatcacgttgagttcacatgtaacttggtgactcagcactgtagtggagaggcctgtttcctagcagagttgttggagtttgcagaagttatttttgctgtctatcatgaaaataccaagtcagcaagtgatataatcagtattgagtcatgcaaagagtatctgcttggagtagtaaaagttccaacaaaagagctgctgatcaagagatctgggatcacaggatggtatcctatcattttaccagaagacgggggcctacctcatggcctggagctcatgcagaagatcgtgggtggtctggagctttcgatttccttcacgcatcgtggagatagagaacgggtgttggaagctgctgagcatttgggctggagctttgagaacagcctgaaagattttgtcagaatggatgaaggggagccagccactgtcaccatctccaccccaaggctgtggctgcccatccattgtgtgctgcttgctggccacaaccacattcataagaatacatattgctaccttcgctacaagttctatgatcatgaagccttttggacccctctcaagaagcctaaggaatctgtaaacaaaaagcagattatggtcactttcaaggcatccaaaagagcagaagtcaccaggggcccatcactgctttggtacttcagggaggagaggctagagatccaagtgtggcgagcttatggcaatgacagtgtggagagaccccatcagacagacagctggattggctcagcctatgtggacctggccagacttggggagaggtcagcgaggacgctaactgtcagtggtgtgtatcctctgtttggacgaaatgcttccaacctctcaggagctgccttgcgagttcatgtggttctttcctctctttcctcacaccttgagcccactcatgagctggactccatggactgcagcagccacagtgagtctgagcagctccccagaaggaatgatgaggtccagctctctccaccagaagtcatctcctgccaccagaagtctcctgcctccacccaggtcccctgcagcagcaccacagctgaagtccgcctgacgcaggagggccctgctgatttggatggaacgtttgcagtcagcatcctagtagaaagagcaatgcacttgagcttgaaagggagccccttgacagagcggaaagtatcgatacccagttgttgtgtatcctttgcaacagccgatgagtcatctcctgtatacacccaagtggttgaaaacacagattcccccatctggaattttcaacagcagtcaaggctatcaaaagagctgcttctggacccacaacaaaccctggtcttcaaagtttggcataaaggagatgaggagagggtgattggctttgcctcggtggacctctccccacttctctctggcttccagtttgtctgtggctggtacaacatcacagacttcagtggagagtgccaggggcagataaaagttgctgtctcccctttggagagtttgatacacttcaaagaagaaaggcaagcaaggcgtggagtggagacctcaaaatcactgatcccaatatacagtcccttttccttccctgcctctgatacgtatgctgcattctccagccacatggcaaggcagaccctagaccaacttgctcatgcctcctcaaaggagcttgatttctcctctcctgggagaagtgataccacaagaagccaagcatcacgccatgaagagcatgtgcagaacattcgccggtttcatgaatccctgcatcttcagggagaggcacccttgccatgtgatgacaaactgaccacatcacctttgtcctcccaaacctccattctgacttctctcaggaagaatctgagtgagcttgatcagattcagaggtacttccgccagaagctcaccaagcctttcctacccctcagccctcagactcaaacggccatctcacagcaccaggagagctgtagggaccatcttgggccaggtgccagcagcctagaccctgggagccagtgtatcctggagaaatccagtaacctggtgttgcaagtcagctccttaatcacagatctgcagactatcaccagggattcgcaagcagctttgagttctcaccgagccaggagtagaagcaacaaggccaccaccctcccagatgctcaggacacagaagcactgcaagaacgatgcacaatgccagatgagccattggtaagagctccagataaaggcacagattccccatcaccccctcctctcgaagagacttcaaatggaggaagaatgctccatgagtccctgaggcatgcagtacccattacaaggatgcagagcagtgaagacactgaggcaggcccagcctacagtgatgaggactatgaagaagacatcattgagcccaggaccttaaatgagatcaccacggtgacagacaaaactagcccttggtctagtgtcatatcagacacaagtgaggtcatcagccctcagcctgacgaggtgcagagggaaggcccctcttgtccttctccagggcctttctgcagagaggagcttatggtcaaaagtagctttctctccagcccagaaagggctgtcaacccccacctgcctaggcagggttctcctagccaaagtcttgttgcttgtgagtgtgaggcctctaaggccagggttggtggcgagtctgcctcagccaaccctcagcccatcccatgcccaacactctcaggagctcaacagagcagcacgtttgttggatggagctcaccacagacagatcagaacaaggagcccaagtcagaggccccagctgagaatgaagctgccaccagtgagctcggtgactctgctgatagcttcaagaagttgccgctaaatctagcctcccagagcagaagggaaaaccataagggaccacccatcgactcctctgacatcaggcagaggcaggtgacaactggatcagagacgtccacaaagcagagcctcctgctcccagggcccattgtggtgcccaacttctttttgcctccccagcagttggaggcttccctgcggatgctttcactctcagcaactttgccaccagcagccacaacagatcaggacaagagcgaagccaccaggggagctctctcccaaaggccttgtcgccccagacctaactcgctccccctcaacctgcctgaggaagaaactctcaggattgcacggatattttcttctcagtactcccagaaagactga

SEQ ID NO: 706 - DNA, 1122 bp, Homo sapiens
  source 1..1122: mol_type = genomic DNA
atgtccctccggaggcacattgggaaccctgagtatctgatgaaaaggataccacagaacccaagataccagcatatcaaatcaagactggacactggtaacagtatgactaaatatactgagaagctcgaagagattaagaaaaattatagatacaaaaaagatgagcttttcaagagactaaaagttacaacttttgcccagctgatcatccaagttgcttccctctctgatcaaacactggaagtgacagctgaggagattcaaaggctggaagacaatgattctgcagcttcagaccctgatgctgaaaccactgccaggaccaatgggaaaggaaatccaggtgagcagtcgccgagccctgagcagttcataaacaacgcaggagcaggggactccagccgctcaactcttcagagtgtcatcagtggtgttggggaactggatctagacaaagggccagtgaagaaagcagagccccataccaaagacaaaccttatcctgactgccccttcctgctgctagatgtgcgtgatagagattcttaccagcagtgccacattgttggagcttacagttacccaattgcaactctgtctagaacaatgaacccttattcaaatgatattcttgaatataaaaatgcccatggcaagatcatcattctgtatgacgatgatgaaaggctggccagtcaggcggccaccaccatgtgcgagcgtggatttgaaaacctcttcatgctttccggaggtctaaaagtcttagctcagaaattcccggaaggactgattactggttccctgccagcatcttgccagcaggcccttcctcctgggtctgcccggaaacgatccagccccaaagggccacccctaccagctgagaataaatggagatttaccccagaagacttaaaaaagatagaatattatctggaagaggagcaagggcctgcagatcatcctagccgactgaaccaagctaactcctccggaagagagtccaaggtgcctggtgcccgaagcgctcagaatctgccaggtggcggccccgccagccactcaaacccccgctccctcagcagtggtcacctgcaaggcaaaccctggaagtaa

SEQ ID NO: 707 - DNA, 2778 bp, Homo sapiens
  source 1..2778: mol_type = genomic DNA
atgccccacaagattggatttgtagtcgtcagctcatctggacacgaagacggcttcagtgcccgggagctcatgatccacgcgccaactgtcagtgggtggcggtcacctagattttgccagtttccacaagaaattgtccttcaaatggtggagagatgtcgaataaggaaactgcagttacttgctcaccagtatatgatttcaagtaaaattgagttctacattagtgaaagcttgcctgaatattttgcaccctatcaagcagagcggtttcgaagacttggctacgtgtctctctgtgataatgaaaagacaggttgcaaagcccgggaactaaaatcagtttatgtggatgcagtaggacaatttcttaaactgatttttcaccaaaaccatgtcaacaaatacaacatatataatcaggttgctttggttgccataaatatcattggagaccctgcagatttcagtgatgaaagcaatactgcctctcgagagaagttgattgaccactaccttgggcacaacagcgaggaccctgctctagaaggaacgtacgccaggaaatctgactatatctctccgctagatgacttagcttttgatatgtaccaagatccagaagttgcacagatcatacgaaaattagatgaaagaaaacgggaagctgtccaaaaggaacgctatgattatgccaagaaactaaaacaagccattgctgatttgcaaaaggttggtgaacgccttgggaggtatgaggtagagaaacgctgtgccgtggagaaggaagactacgatctcgccaaggagaagaagcagcagatggagcagtatcgtgccgaggtgtacgagcagctggagctgcacagcctcctggatgccgagctgatgcgaagaccttttgatttgcccctccagcccctcgctcgttctggcagtccttgccaccaaaagccaatgccctcactaccacaactggaagaaagaggaacagaaaaccagtttgcagaacctttccttcaggaaaagccttcatcatattctctaactatttctcctcagcattctgcagtagacccgttactccctgccacagatcctcatccaaagatcaatgcagagtccctgccctacgatgagcggcctcttccagctattcgtaagcattatggggaggcagtggtggagccggaaatgagtaatgcagacatcagcgatgctcggaggggaggcatgttaggggagccagagcccttaaccgagaaggccttgagagaagccagctctgccatcgatgtgttgggagaaaccttggttgctgaggcctattgtaagacgtggtcctaccgagaggatgcactgcttgccttgtctaagaagttaatggaaatgcctgttggaaccccaaaagaagatttaaagaacacactgagagcatccgtctttctcgttagaagagccataaaggacattgtgacctccgtttttcaggcttctttgaaattgttgaaaatgatcattacacaatatattcctaaacataaactgagtaaacttgaaacagctcactgtgtggagaggaccattcccgttttgctcaccagaactggagattcttctgcccgcctccgcgtcacagctgcaaattttattcaggaaatggccttgtttaaagaagttaagtctctccaaattattccatcctacctggtgcagccattgaaagcaaactcttcagttcacctggcaatgagtcagatgggcctcctggcccggctgctgaaagacctgggcactggcagctcgggcttcaccattgacaacgtgatgaagttttcagtgagtgccctggagcatagagtgtatgaggtccgcgagacggcggttcgaattattttggacatgtacagacagcaccaggcttccatcctggagtaccttcctccagacgacagcaacacacgcaggaacattctctacaaaacaatttttgagggatttgctaaaatagatggcagagctacagatgctgagatgagggcacggagaaaagcggctacagaagaagcagaaaaacaaaagaaagaagaaataaaagctttacaagggcagctggcagcactgaaagaaattcaggctgaagttcaggaaaaagaaagtgatgctgtgaagccaaagaatcaggacattcaaggagggaaagcagcccctgctgaagctctgggaatcccggatgagcactatctagataatttgtgtattttttgtggggaaaggagtgaatccttcacagaggaaggtctggatctccactactggaagcactgtctcatgctgacaagatgtgaccactgcaaacaggtggtcgagatatccagtctgacggagcacttgctgacggaatgtgacaaaaaagacgggtttggaaagtgttaccgttgcagtgaggctgttttcaaggaagagctgcccagacacataaaacacaaggattgcaaccctgccaaaccggagaagctggcaaaccggtgtcccctgtgtcatgagaacttcagccctggagaagaggcatggaaagctcacctgatgggcccagccggctgcacgatgaacctgcgcaagacacacattctgcagaaggccccggcactgcagccagggaaaagctcagctgtggccgcatcaggccccttggggtcaaaggccggaagcaagatccccaccccgaagggcggactgagcaagagctccagcaggacgtacgccaagcgctga

SEQ ID NO: 708 - DNA, 2961 bp, Homo sapiens
  source 1..2961: mol_type = genomic DNA
atggtctccaaatccgaccaattgctcatcgtcgtgtccatcctagaaggtcggcatttccccaaacgtccaaagcatatgcttgtagtggaagcaaagtttgatggagaacagttggctactgatcctgtggaccacactgaccagccagaatttgctactgagttagcttgggaaattgacaggaaagcgcttcatcagcacaggctacagcgtactcctatcaaactccaatgttttgccttggatcctgtaacttcagccaaggaaaccataggttacatcgttctggatttaagaaccgctcaagaaacaaagcaggcaccaaaatggtaccagttgctgagtaataaatacaccaaattcaagtctgagatacagataagtattgctttggaaaccgatacaaagccaccagtggatagctttaaagcaaagggggctccccctcgagatggaaaagtacctgccatcctggctggacttgaccccagggacattgtggctgtgctgaatgaagagggaggctaccatcagattggaccagcagaatactgtactgactcctttattatgtcagtgaccatagcatttgctacccagttggaacagttaattccatgtaccatgaaacttccagaaagacagcctgagtttttcttttactactctttactgggaaatgatgttacaaatgaacccttcaatgatttaatcaacccaaactttgagccagagagagcatcagttcgcatccgtagcagtgtagaaattcttcgtgtttacctggctcttcagtctaaactgcagattcacctctgctgtggagaccagtcacttggaagtacagaaatacctttaactggattacttaaaaagggcagtacagaaatcaaccagcacccagtcacagtcgaaggtgcttttacccttgaccctccaaacagagccaaacagaagcttgcacctattcctgtggagctagccccaactgtgggagtgtctgtggctctgcagagagaaggcatagactcccagtctttaattgaattaaagacccagaatgaacatgagccagagcattcaaagaagaaagttttaacccccataaaggagaagacacttactgggccaaaatcaccaacagtgtcccctgttccatctcacaaccagtcacctccaacaaaagatgatgcaacagaaagtgaagtggaaagtttacagtatgataaggacaccaaaccaaatccaaaagccagttcttctgtacctgcttcactggcccagctagtgactacatccaatgcttcagaagtagcttcaggacagaagattgctgtaccagcaacatcacatcatttttgcttttcaatagacttaaggagtatacatgccttggagattggttttccaatcaactgtatattaaggtactcatatccattctttggaagtgcagctcctattatgactaatcctcctgtagaagttcggaaaaacatggaagtttttcttccccagtcttactgtgcatttgattttgcaactatgcctcatcagctgcaagacaccttcttaaggattccattactggttgaactatggcacaaggataaaatgagtaaagatttacttctgggaattgcgagaatccagctttctaacatcttgtcttcagaaaaaactcgttttttaggttctaatggtgaacagtgttggcgtcaaacttacagtgaaagtgtgcctgttatagcagcacaaggatcaaataacaggatagcagatctttcttacacagtgactctagaagattatggactagtaaaaatgcgtgagatttttatctctgattcatctcagggtgtatctgccgtacagcaaaagccgtcttctcttcctccagcaccttgtccttcagagatccagacagagcctcgtgaaacgttagaatacaaagcagcacttgagctagaaatgtggaaggagatgcaagaagatatatttgaaaatcagctgaagcagaaagaactggctcatatgcaggctcttgcagaggaatggaagaaaagggaccgagaaagagaatcactagtaaagaaaaaggtggctgaatatactattctagaaggaaaacttcaaaaaactctaattgacttggagaagcgagagcagcagcttgctagtgtggaatcagagcttcaaagagaaaaaaaggaactgcaatcagaacgtcagcggaacctgcaagaactgcaggactctatccgtagggccaaagaggactgtattcaccaagtagaactagaaaggttaaaaatcaaacagctcgaagaggataaacaccgccttcagcaacagcttaatgatgctgaaaataagtataagattttggaaaaagagttccaacagttcaaggaccagcaaaacaacaaaccagaaatccgtctacagtctgaaataaatcttctcaccttggaaaaggttgaacttgaaagaaagttggaatctgcaactaagtctaaactgcattacaagcagcagtggggacgagctttgaaagaacttgccagacttaaacagagggagcaagaaagtcaaatggctcgtcttaaaaaacagcaggaagaattggaacagatgagactacgttaccttgccgctgaggaaaaagatacagtaaaaaccgagcgacaagaattgttggatataagaaatgaattgaacaggttaaggcaacaagagcaaaaacaataccaggattccacagagattgcaagtggaaaaaaggatggcccccatggcagtgtattggaagaaggtttggatgattatttgactcgcctgatagaagaaagggatactttgatgagaacgggtgtgtataatcacgaggatcgaataataagtgaactcgaccgacagatcagagagattttggcaaaaagcaatgccagtaattaa

SEQ ID NO: 709 - DNA, 5250 bp, Homo sapiens; identical to SEQ ID NO: 412
  source 1..5250: mol_type = genomic DNA

SEQ ID NO: 710 - DNA, 4857 bp, Homo sapiens
  source 1..4857: mol_type = genomic DNA
atggacggtcagactctgcgaaaggccgagagaagctggtcctgctcacgagagaaaaaggagggttacgctaaggacatggtgacagactttgatgagaaacatgatgagtatttaatattgcttcagcagaggaaccggatattaaagcatttgaaaagcaaggaccccgtgcaattgaggctggagcacttggagcaaggtttctctgtctatgtcaacggtgccaattcggagctgaaatcatcaccgcggaaagctattcactctgacttctccagaagtgcctcccacacggaggggacacacgattatggacgaagaactctgtttcgagaagctgaagaagccttaagacgcagttcacggacagcccccagtaaagtccagcgccgaggatggcaccagaaatctgtgcagatcagaacagaagctggcccacggctccacatcgaacctcctgtggactattctgatgattttgagctgtgtggggatgtgactctccaggcaaacaacacttctgaggatcgtccgcaggagctgagaagaagcctggaacttagtgtaaatctacaaaggaaacaaaaggattgttccagcgatgagtatgactctattgaggaagacatactctctgagcctgagccagaggacccggcactggtgggccatcccagacatgaccgccctccttccagtggcgactggactcagaaagatgttcacggggaacaggagacagaaggacgctcttctccaggcccagacaccctcgtggtgctggaatttaacccagcttccaaaagtcataaaagggaaaggaatttgtctgcaaagcggaaggacaatgctgaggttttcgttcccaccaaacctgagccaaacctgactccccaagctcctgctgtattcccagaccaggagaggatgtgctccagacctggaagccggcgagagagacccctgtctgcaacccgcaaaactctttgcgaggctgagtacccagaggaagatgcctctgctgtgctccaagccatccaggtggagaacgcagccctgcagagggcgctcctcagcagaaaggccgagcagccagccagcccactgcaggatgcagaaggaccaccagcaaaaccatggaccagtctgctggaggagaaggaagagacccttgagctgcttcccatcaccacggcgactactactcaggagccggccggggcagcaggaggagccagggccatcaaccaggccatggacagaattgggcttctgggaagcagacaacagcagaagcttctgaaagtcctccaggccgtcgaaagtgactctgcccatctcggcagggtggtttcaccaaccaaggagcaagtatcagacacagaggacaaacagagaatgagggcagacgagatcaaagatgccatctacgtgaccatggagatcctgtccaactggggcaactcgtggtgggtgggtctcacagaagtcgagttctttgacttgaatgacacaaagctttatgtgtcgccccacgatgtggatatccggaacacagccacgcctggggagctgggccgcctcgtcaacaggaacttagctggcaagaaagactcctccccgtggacctgccccttccacccaccactccagctgttttttgttattcgaaacacaagacagctgggggacttccatctggccaagatcaaggttcggaattactggacagctgatggcgatcttgacattggtgccaagaacgtgaagctttacgtcaacagaaacctcatcttcaatggcaagttagacaaaggagatagggaggccccagctgaccacagcatcctggttgaccagaagaacgagaagagcgagcaactagaggaggccatgaacgctcactcggaagaaagcaaaggcacccatgagatggctggtgccagcggggacaaggagcttggtctcggttgctcaccgccagctgaaacattagcggatgcaaagctttcttcacaaggaaatgtgtctggcaaaagaaagaattctactaattgcaggaaagacagtttgtcccagttagaggaatatttgagactgtcggcagtccccacttcgatgggtgacatgcccagtgctcctgccacttccccacctgtgaagtgccctcctgtccatgaggagccctctctcatccaacaactggaaaacctcatgggcagaaaaatctgtgagccacccgggaaaaccccatcctggttacaaccttctcccaccggcaaggacaggaagcagggaggcaggaagccaaaacccctctggcttagtcccgagaagcccctggcctggaagggcaggctcccatcagacgatgtcatcggtgagggtcctggagagaccgaggccagggataaaggcctacggcatgagccagggtgggggaccagccggagtgtcaacaccaaggagagaccccagagggcaaccaccaaagtccacagtgatgactcagacatctttaaccagccccccaacagagagcgccctgctagtgggaggaggggctcaaggaaggatgctggcagcagtagtcatggggacgaccagccagccagcagagaagacacctggtcttccaggacgccgtcacggtcaaggtggcgcagtgagcaggagcacacacttcacgagtcatggagctccctcagtgccttcgaccgctcccaccggggacgcatctccaacacggagctcccgggggacatcctggatgagctcctgcagcaaaagagcagccggcacagcgacttgcccccctccaagaagggggagcagccagggctgtcgagagggcaggatggctactctggagagacagacgctgggggtgactttaaaatccccgtcttgccttatggacagcgcttggtcattgacatcaagtctacctggggggacagacactatgtcggcctcaacggaatagaaatattcagttccaagggtgaaccggtgcagatttcaaacataaaagcagaccctcccgatatcaatattttaccagcctatgggaaagacccccgcgtggtcaccaacctcatcgacggggtgaacaggacccaggatgacatgcatgtctggctggcccccttcacgcggggcagatcccactccatcaccattgacttcacgcacccttgccacgttgccctgatcagaatttggaactacaataaatctcggatacattccttccgaggcgtgaaggacatcacaatgctgttagacacccagtgcatctttgaaggagaaatcgccaaggcctctggaaccctggcgggagccccagagcactttggagacacgatcttattcacaaccgatgatgacattctcgaggccatattctattctgatgagatgtttgacctggatgtggggagcctggacagcctgcaggatgaagaggcaatgaggaggcccagcacggccgacggcgagggggatgagcggcccttcacccaggctggcttgggggctgatgaacggatcccggagctagagctcccatccagttcccctgtcccccaagtcaccacgccagagccaggcatctaccacggaatctgccttcagctgaatttcactgcctcctggggagacttgcactacctggggctcactggcctggaagtggtgggcaaggagggccaggcgctgcccatccacctgcaccagatctctgcttcccccagagacttaaatgagctccccgagtactctgacgactcccgggccctggacaagttaattgatggcaccaacatcaccatggaggatgagcatatgtggctgatccccttctcgccggggctggaccatgtggtcacgatccgcctggacagggccgaaagcatcgcaggcctgcgcttctggaactacaataaatctcccgaggacacctatcgcggggccaagattgtccacgtctccctggatggcctgtgcgtctccccgccagagggctttctcatccggaaggggccaggcaactgccactttgattttgctcaagaaatcctcttcgtggactacctacgggctcagctgctgccccagccggccaggaggctggacatgagaagcctggagtgtgcaagcatggactacgaggcaccgctgatgccctgtggcttcattttccagtttcagcttctcaccagctggggcgacccctactacatcggcctcaccggcctggagctgtatgacgagcgaggagaaaaaatccccttgtcggaaaacaatattgcggccttccccgacagcgtgaactccctggagggtgtgggcggggacgtccgcaccccagacaagctcatcgaccaagtgaacgacaccagtgatggccggcacatgtggctggctcccatcctgccgggcctggtgaaccgggtttatgtgattttcgatctgcctaccaccgtgtcaatgatcaaactgtggaattatgcgaaaacaccccatcgaggggtgaaggagtttggcctcctggtggacgacctgcttgtgtacaatgggatcctggccatggtgagccacctggtggggggcatcctgcccacatgtgagcccaccgtgccctaccacaccatcctcttcaccgaggacagggacatccgccaccaggagaaacacaccaccatcagtaatcaggccgaggatcaagatgtccagatgatgaatgaaaaccaaatcattaccaacgcgaaacggaagcagagcgttgttgacccagccttacgtcccaaaacctgcatcagcgagaaggagacgagacgacggcgctgctga

SEQ ID NO: 711 - DNA, 4032 bp, Homo sapiens
  source 1..4032: mol_type = genomic DNA
atggggctggaggctcagaggctgccaggggctgaggaggccccagtgcgggttgccctgcgagttcgaccactgctgcccaaggagctgctgcacgggcatcagagctgcctgcaggtggagccagggcttggccgcgtcactctgggccgtgaccgacactttggcttccacgtggtgctggccgaggatgcggggcaggaggccgtgtaccaggcctgcgttcagcccctccttgaggccttcttcgagggcttcaatgccactgtctttgcctatggtcagacgggctcagggaagacatacaccatgggggaggccagtgtggcctccctccttgaggatgagcagggcattgtcccgagggccatggccgaggccttcaagctcatcgatgagaacgacctgcttgactgtctggtacatgtgtcctacctggaagtgtacaaggaggagttccgagacctgctcgaggtgggcactgccagccgtgacatccagctccgggaagatgagcgcgggaatgttgtgctgtgcggggtgaaggaggtcgacgtggagggcctggatgaggtgctgagcctcctggagatgggcaacgcggcgcggcacacgggagccacgcacctcaaccacctgtctagccgctcacacacggtcttcaccgtgaccctggagcagcgggggcgcgcccccagccgcctaccccgccccgccccgggccagctgctcgtctccaagttccacttcgtggacctggcgggctcagagagggtgctcaagacgggcagcaccggcgagcggctcaaggagagcatccagatcaacagcagcctcctggcgctgggcaacgtcatcagcgccctgggggaccctcagcgccggggcagccacataccctaccgcgactccaagatcacccggatcctcaaagactcgctgggcgggaacgccaagacggtgatgatcgcctgcgtcagcccttcctcctccgacttcgacgagaccctcaacaccctcaactacgccagccgcgcccagaacatccgcaaccgcgccacggtcaactggcggcccgaggccgagcggccacccgaagagacggcgagcggcgcgcggggtccgccacggcaccgctccgagacccgcatcatccaccgcggccggcgcgccccaggcccagccaccgcctccgcggcggccgccatgcgcctgggcgccgagtgcgcgcgctaccgggcctgcaccgacgccgcctacagcctcttgcgcgagctgcaggccgagcccgggctgcccggcgccgccgcccgcaaggtgcgcgactggctgtgcgccgtcgagggcgagcgcagcgccctgagctccgcctccgggcccgatagcggcatcgagagcgcctccgtcgaggaccaggcggcgcagggggccggcgggcgaaaggaggatgagggggcgcagcagctgctgaccctgcagaaccaggtggcgcggctggaggaggagaaccgagactttctggctgcgctggaggacgccatggagcagtacaaactgcagagcgaccggctgcgtgagcagcaggaggagatggtggaactgcggctgcggttagagctggtgcggccaggctgggggggcccgcggctcctgaatggcctgcctcccgggtcctttgtgcctcgacctcatacagcccccctggggggtgcccacgcccatgtgctgggcatggtgccgcctgcctgcctccctggagatgaagttggctctgagcagaggggagagcaggtgacaaatggcagggaggctggagctgagttgctgactgaggtgaacaggctgggaagtggctcttcagctgcttcagaggaggaagaggaggaggaggagccgcccaggcggaccttacacctgcgcagaaataggatcagcaactgcagtcagagggcgggggcacgcccagggagtctgccagagaggaagggcccagagctttgccttgaggagttggatgcagccattccagggtccagagcagttggtgggagcaaggcccgagttcaggcccgccaggtcccccctgccacagcctcagagtggcggctggcccaggcccagcagaagatccgggagctggctatcaacatccgcatgaaggaggagcttattggcgagctggtccgcacaggaaaggcagctcaggccctgaaccgccagcacagccagcgtatccgggagctggagcaggaggcagagcaggtgcgggccgagctgagtgaaggccagaggcagctgcgggagctcgagggcaaggagctccaggatgctggcgagcggtctcggctccaggagttccgcaggagggtcgctgcggcccagagccaggtgcaggtgctgaaggagaagaagcaggctacggagcggctggtgtcactgtcggcccagagtgagaagcgactgcaggagctcgagcggaacgtgcagctcatgcggcagcagcagggacagctgcagaggcggcttcgcgaggagacggagcagaagcggcgcctggaggcagaaatgagcaagcggcagcaccgcgtcaaggagctggagctgaagcatgagcaacagcagaagatcctgaagattaagacggaagagatcgcggcattccagaggaagaggcgcagtggcagcaacggctctgtggtcagcctggaacagcagcagaagattgaggagcagaagaagtggctggaccaggagatggagaaggtgctacagcagcggcgggcgctggaggagctgggggaggagctccacaagcgggaggccatcctggccaagaaggaggccctgatgcaggagaagacggggctggagagcaagcgcctgagatccagccaggccctcaacgaggacatcgtgcgagtgtccagccggctggagcacctggagaaggagctgtccgagaagagcgggcagctgcggcagggcagcgcccagagccagcagcagatccgcggggagatcgacagcctgcgccaggagaaggactcgctgctcaagcagcgcctggagatcgacggcaagctgaggcaggggagtctgctgtcccccgaggaggagcggacgctgttccagttggatgaggccatcgaggccctggatgctgccattgagtataagaatgaggccatcacatgccgccagcgggtgcttcgggcctcagcctcgttgctgtcccagtgcgagatgaacctcatggccaagctcagctacctctcatcctcagagaccagagccctcctctgcaagtattttgacaaggtggtgacgctccgagaggagcagcaccagcagcagattgccttctcggaactggagatgcagctggaggagcagcagaggctggtgtactggctggaggtggccctggagcggcagcgcctggagatggaccgccagctgaccctgcagcagaaggagcacgagcagaacatgcagctgctcctgcagcagagtcgagaccacctcggtgaagggttagcagacagcaggaggcagtatgaggcccggattcaagctctggagaaggaactgggccgttacatgtggataaaccaggaactgaaacagaagctcggcggtgtgaacgctgtaggccacagcaggggtggggagaagaggagcctgtgctcggagggcagacaggctcctggaaatgaagatgagctccacctggcacccgagcttctctggctgtcccccctcactgagggggccccccgcacccgggaggagacgcgggacttggtccacgctccgttacccttgacctggaaacgctcgagcctgtgtggtgaggagcaggggtcccccgaggaactgaggcagcgggaggcggctgagcccctggtggggcgggtgcttcctgtgggtgaggcaggcctgccctggaactttgggcctttgtccaagccccggcgggaactgcgacgagccagcccggggatgattgatgtccggaaaaaccccctgtaa

SEQ ID NO: 712 - DNA, 453 bp, Homo sapiens
  source 1..453: mol_type = genomic DNA
atgtcagccaaggacgagcgggccagggagatcctgaggggcttcaaactaaattggatgaaccttcgggatgctgagacagggaagatactctggcaaggaacagaagacctgtctgtccctggtgtggagcatgaagcccgtgttcccaagaaaatcctcaagtgcaaggcagtgtctcgagaacttaatttttcttcgacagaacaaatggaaaaattccgcctggaacaaaaagtttacttcaaagggcaatgcctagaagaatggttcttcgagtttggctttgtgatccctaactccacaaatacctggcagtccttgatagaggcagcacccgagtcccagatgatgccagcaagcgtcttaactgggaacgttatcatagaaacaaagttttttgacgacgatcttcttgtaagcacatccagagtgagacttttctatgtttga

SEQ ID NO: 713 - DNA, 1764 bp, Homo sapiens
  source 1..1764: mol_type = genomic DNA
atgaggccgcgaggtctcccgccgctcctggtggtgctcctgggctgctgggcctccgtgagcgcccagaccgatgccaccccggcggtgacgacagagggcctcaactccaccgaggcagccctggccaccttcggaactttcccgtcgaccaggccccccgggactcccagggctccagggccctcctccggccccaggcctaccccagtcacggacgttgctgttctctgtgtctgtgacttatccccagcacagtgtgacatcaactgctgctgtgatcccgactgcagctccgtggatttcagtgtcttttctgcctgctcagttccagttgtcacgggcgacagccagttttgtagtcaaaaagcagtcatctattcattgaattttacagcaaacccacctcaaagagtatttgaacttgttgaccagattaatccatctattttctgcattcatattacaaactataaacctgcattatcctttattaatccagaagtacctgatgaaaacaattttgatacattgatgaaaacatctgatggttttacattgaatgctgaatcatatgtttccttcacaaccaaactggatattcctactgctgctaaatatgagtatggggttcctctgcagacttcagattcgtttctgagatttccttcgtccctgacatcatctctgtgcactgataataaccctgcagcgtttctggtgaaccaggctgttaagtgcaccagaaaaataaatttagaacagtgtgaagaaattgaagccctcagcatggctttttacagcagcccggaaattctgagggtacctgattcaagaaaaaaggtccctatcactgttcagtccatcgtcattcagtctctaaataaaacgctcacccgacgggaggacactgatgtgctgcagccgactctcgtcaacgctggacactttagcctttgcgtgaatgttgttcttgaggtaaagtacagcctcacatacacagatgcaggtgaagtcaccaaagctgatctctcattcgttctggggacagttagcagcgtagtggtcccactgcagcaaaagtttgaaattcattttcttcaggaaaatacccagccagtccctctcagtggaaaccctggttatgtcgtggggctcccattagctgctggattccagcctcataaggggtctgggattattcagaccacaaatagatatggacagcttactattcttcatagcacaactgagcaagactgcttagcactggagggggtccggaccccagtattatttggttacactatgcaatctggctgtaaactaagactgactggagctctcccgtgtcagctcgtagcacagaaggtgaagagcctgctgtggggccagggcttcccagattacgtggccccttttggaaattcccaggcccaggacatgctggactgggtgcccatccacttcatcacccagtcattcaacaggaaggattcctgccagctcccaggggctttggttatagaagtgaagtggactaaatacggatccctgctgaatccacaggccaaaatagtcaatgtaactgcaaatctaatttcatcctcctttcctgaggccaactcaggaaatgaaaggacgattcttatttccactgcggttacttttgtggatgtgtctgcacctgcagaggcaggcttcagagctccaccagccatcaatgccaggctgccctttaacttcttcttcccgtttgtttga

SEQ ID NO: 714 - DNA, 1824 bp, Homo sapiens
  source 1..1824: mol_type = genomic DNA
atgcgcaccccacagctcgcgctcctgcaagtgttctttctggtgttccccgatggcgtccggcctcagccctcttcctccccatcaggggcagtgcccacgtctttggagctgcagcgagggacggatggcggaaccctccagtccccttcagaggcgactgcaactcgcccggccgtgcctggactccctacagtggtccctactctcgtgactccctcggcccctgggaataggactgtggacctcttcccagtcttaccgatctgtgtctgtgacttgactcctggagcctgcgatataaattgctgctgcgacagggactgctatcttctccatccgaggacagttttctccttctgccttccaggcagcgtaaggtcttcaagctgggtttgtgtagacaactctgttatcttcaggagtaattccccgtttccttcaagagttttcatggattctaatggaatcaggcagttttgtgtccatgtgaacaactcaaacttaaactatttccagaagcttcaaaaggtcaatgcaaccaacttccaggccctggctgcagagtttggaggcgaatcattcacttcaacattccaaactcaatcaccaccatctttttacagggctggggaccccattcttacttacttccccaagtggtctgtaataagcttgctgagacaacctgcaggagttggagctgggggactctgtgctgaaagcaatcctgcaggtttcctagagagtaaaagtacaacttgcactcgttttttcaagaacctggctagtagctgtaccttggattcagccctcaatgctgcctcttactataacttcacagtcttaaaggttccaagaagcatgactgatccacagaatatggagttccaggttcctgtaatacttacctcacaggctaatgctcctctgttggctggaaacacttgtcagaatgtagtttctcaggtcacctatgagatagagaccaatgggacttttggaatccagaaagtttctgtcagtttgggacaaaccaacctgactgttgagccaggcgcttccttacagcaacacttcatccttcgcttcagggcttttcaacagagcacagctgcttctctcaccagtcctagaagtgggaatcctggctatatagttgggaagccactcttggctctgactgatgatataagttactcaatgaccctcttacagagccagggtaatggaagttgctctgttaaaagacatgaagtgcagtttggagtgaatgcaatatctggatgcaagctcaggttgaagaaggcagactgcagccacttgcagcaggagatttatcagactcttcatggaaggcccagaccagagtatgttgccatctttggtaatgctgacccagcccagaaaggagggtggaccaggatcctcaacaggcactgcagcatttcagctataaactgtacttcctgctgtctcataccagtttccctggagatccaggtattgtgggcatatgtaggtctcctgtccaacccgcaagctcatgtatcaggagttcgattcctataccagtgccagtctatacaggattctcagcaagttacagaagtatctttgacaactcttgtgaactttgtggacattacccagaagccacagcctccaaggggccaacccaaaatggactggaaatggccattcgacttctttcccttcaaagtggcattcagcagaggagtattctctcaaaaatgctcagtctctcccatccttatcctgtgcctcttactacttggagttctcaacctagagactatgtga

SEQ ID NO: 715 - DNA, 423 bp, Homo sapiens
  source 1..423: mol_type = genomic DNA
atgggccgggtctcagggcttgtgccctctcgcttcctgacgctcctggcgcatctggtggtcgtcatcaccttattctggtcccgggacagcaacatacaggcctgcctgcctctcacgttcacccccgaggagtatgacaagcaggacattcagctggtggccgcgctctctgtcaccctgggcctctttgcagtggagctggccggtttcctctcaggagtctccatgttcaacagcacccagagcctcatctccattggggctcactgtagtgcatccgtggccctgtccttcttcatattcgagcgttgggagtgcactacgtattggtacatttttgtcttctgcagtgcccttccagctgtcactgaaatggctttattcgtcaccgtctttgggctgaaaaagaaacccttctga

SEQ ID NO: 716 - DNA, 489 bp, Homo sapiens
  source 1..489: mol_type = genomic DNA
atgctccagaccagtaactacagcctggtgctctctctgcagttcctgctgctgtcctatgacctctttgtcaattccttctcagaactgctccaaaagactcctgtcatccagcttgtgctcttcatcatccaggatattgcagtcctcttcaacatcatcatcattttcctcatgttcttcaacaccttcgtcttccaggctggcctggtcaacctcctattccataagttcaaagggaccatcatcctgacagctgtgtactttgccctcagcatctcccttcatgtctgggtcatgaacttacgctggaaaaactccaacagcttcatatggacagatggacttcaaatgctgtttgtattccagagactagcagcagtgttgtactgctacttctataaacggacagccgtaagactaggcgatcctcacttctaccaggactctttgtggctgcgcaaggagttcatgcaagttcgaaggtga

SEQ ID NO: 717 - DNA, 951 bp, Homo sapiens
  source 1..951: mol_type = genomic DNA
atggcgctctatgagctcttctctcacccggtcgagcgcagttaccgcgcggggctctgctccaaagccgcgctgttcctgctgctggccgctgcgctcacgtacatcccgccgctgctggtggccttccggagccacgggttttggctgaagcggagcagctacgaggagcagccgaccgtgcgcttccaacaccaggtgctgctcgtggccctgctcggacccgaaagcgacgggttcctcgcctggagcacgttccccgccttcaaccggctgcaaggggatcgcctgcgcgtcccgctcgtttcgactagagaagaagacaggaaccaggatgggaagacggacatgttacattttaagctggagcttcccctgcagtccacggagcacgttctcggtgtgcagctcatcctgactttctcctatcgattacacaggatggcgaccctcgtgatgcagagcatggcgtttctccagtcctcctttcctgtcccgggatcccagttatacgtgaacggagacctgaggctgcagcagaagcagccgctgagctgtggtggcctagatgcccgatacaacatatccgtgatcaacgggaccagcccctttgcctatgactacgacctcacccatattgttgctgcctaccaggagaggaacgttaccaccgtcctgaatgatcccaaccccatctggctggtgggcagggccgcagatgctccatttgtgattaatgctatcatccgataccctgtggaagtcatttcttatcagccaggattctgggagatggtaaagttcgcctgggtgcagtatgtcagcatcctgcttatcttcctctgggtgtttgaaagaatcaagatcttcgtgtttcagaatcaggtggtgaccaccattcctgtgacagtgacgccccggggagacttgtgtaaggagcacttatcctag

SEQ ID NO: 718 - DNA, 3951 bp, Homo sapiens
  source 1..3951: mol_type = genomic DNA
atggactcgcaggaattgaagactttgattaattactattgtcaagagagatatttccatcatgtattactggttgccagtgaaggaattaagaggtatggaagtgatccagtcttcaggttttatcatgcctatggcacattaatggaaggtaaaactcaagaagctcttcgagaatttgaggctattaaaaataaacaagatgtatcactttgttctctacttgcactgatatatgcccataaaatgagtcctaatccagatagagaagctattctggaatcagatgccagagtgaaggaacaacgtaaaggagctggagagaaagccttataccatgcaggcttatttttatggcacattggtcgccatgataaagcaagggaatatattgacagaatgatcaaaatatcagatggtagtaaacagggacacgttttgaaagcatggcttgatattacaagaggaaaagagccttacactaaaaaagcactgaagtattttgaagagggactccaagatgggaatgatacttttgctctgctgggtaaggcacaatgccttgagatgcgccagaattattcaggtgccctggagactgtgaaccagataatcgtgaattttccgagcttccttcctgcttttgttaagaaaatgaaattacaactagccttgcaggattgggaccagacagttgagacagcacaaaggttgctgctccaagatagccaaaatgtggaagcactgagaatgcaggcactctactatgtgtgtagagagggggatatagagaaggcttccaccaagctggaaaacttgggaaatacattggatgccatggaaccacagaatgctcaacttttctataacattacactcgccttcagcagaacttgtggacgtagtcaacttattcttcaaaaaattcaaacgttacttgagagagcttttagtttaaaccctcagcaatcagaatttgctacagaacttggataccaaatgattttacaaggaagagttaaagaggcactgaagtggtataagaccgccatgacacttgatgagactagtgtgtctgccctagttggatttatccaatgtcagttgatagaagggcaattacaggatgcagatcagcagctagaatttttaaatgaaatccagcaatccattggaaaatctgcggaattaatctatttacatgcagttcttgccatgaagaaaaataaacgacaagaagaagttattaatttgttaaatgatgtcctggacactcacttttcacaattagaaggtttgcctcttggcatacagtattttgaaaagctaaatcctgatttcttgttagaaattgttatggagtatctgagcttctgtccaatgcagcctgcaagtcctgggcaacctctttgtccacttctcaggcgttgcatctcagtcctggagactgtagtaagaactgttccaggtcttctgcaaacagtcttcctaatagcaaaagtgaaatatttgtcaggtgatattgaagcagctttcaataaccttcagcactgcttagaacacaatccctcttatgctgatgctcatctgctgctagctcaggtttacttgtctcaagaaaaagtcaaattgtgttctcagtctcttgaactttgtctgagctatgattttaaggtgagagactatcctttataccatttgataaaagctcagtcacaaaagaaaatgggagaaatagcagacgcaattaaaacactgcatatggcaatgagtttaccaggaatgaaaagaattggagcttccacaaaatcaaaagacagaaaaactgaagttgatacaagccatcgtttatcgatctttcttgaattgatagacgttcaccgcttaaatggagagcagcatgaggcaaccaaagttttacaagatgccatccatgaattttctggaacatctgaagaagtgcgggttaccattgctaatgcagaccttgctctagcccaaggagatattgaacgggctttaagcatccttcagaatgttacagccgaacagccttattttatagaggccagagaaaaaatggcagatatttatctgaagcacagaaaagataaaatgttatatatcacttgttttagagaaattgctgaaagaatggctaaccctcggtcttttcttctccttggtgatgcatacatgaatattctagagcctgaagaagccatagtagcatatgagcaagcattaaatcagaacccgaaagatggaacattggcaagcaaaatgggcaaagcacttatcaaaactcataactactcaatggcaatcacttactatgaagctgctctgaaaactggacaaaagaattatctttgctatgacctggctgagctcttattaaaattgaaatggtatgacaaagcagaaaaagttcttcagcatgctctggctcatgaacctgtaaatgaactgtcagctctcatggaggatggacgttgtcaagttcttctagcaaaagtttatagtaaaatggaaaaacttggtgatgcgatcactgcattacaacaggctcgagaattacaagctcgggtactaaaacgtgttcagatggaacagccagatgcagttcctgcacagaaacatttagcagctgaaatttgtgcagagattgcaaaacattctgttgctcagcgagactatgaaaaagcaattaagttttatagagaggctctggttcactgcgaaacagataataagattatgttggaactggcacgattatacctggcacaagatgaccctgattcctgcctgcggcagtgtgctctactgcttcagagtgaccaggataacgaagctgctaccatgatgatggctgatctcatgttcagaaaacaagactatgaacaagcagtgtttcatttacagcagcttttagaacgtaagccagataattatatgacattatctcgtttgattgatctcctaagaagatgtggaaaactcgaggatgtcccaagatttttctcaatggctgagaaacgtaactccagagcaaaattggaaccaggatttcagtattgtaaaggactgtatctttggtacactggagaaccaaatgatgcccttcgacattttaataaagctcggaaagatcgtgactggggccaaaatgccctttataatatgatagagatctgtttgaatccagataatgaaactgttggaggtgaagtatttgaaaacctggatggagacctgggtaattcaactgagaagcaagaatctgtgcaactggcagtaagaacagcagaaaaacttcttaaggaactaaaacctcagactgttcagggtcacgtacagcttcgcataatggaaaactattgcttaatggctaccaaacagaaatctaatgttgaacaagcattaaataccttcactgaaatagcagcatctgagaaggagcatatcccagcgctcttgggaatggcaacggcttatatgatcttgaaacagactccacgagccagaaaccagctgaagcgtattgcgaaaatgaattggaatgctattgatgctgaagagtttgagaagagttggctgctacttgctgatatttacattcaatcagcaaaatatgacatggcagaagacctgttaaaacggtgcctgcgtcataatagatcttgctgcaaagcttatgaatatatgggatacattatggaaaaagagcaagcatatacagatgctgccttgaactatgagatggcatggaaatatagcaatcggacaaatccggcagtaggatacaaactggcatttaattacttaaaagcaaaaagatatgtggattcaattgacatatgtcaccaggttcttgaagcacatccaacttatccaaaaatcagaaaggatatacttgataaggcccgtgcgtctttaagaccttga

SEQ ID NO: 719 - DNA, 1572 bp, Homo sapiens
  source 1..1572: mol_type = genomic DNA
atggagtcagctccggcagcccccgaccccgccgccagcgagccaggcagcagcggcgcggacgcggccgccggctccagggagaccccgctgaaccaggaatccgcccgcaagagcgagccgcctgccccggtgcgcagacagagctattccagcaccagcagaggtatctcagtaacgaagaagacacatacatctcaaattgaaattattccatgcaagatctgtggagacaaatcatcaggaatccattatggtgtcattacatgtgaaggctgcaagggctttttcaggagaagtcagcaaagcaatgccacctactcctgtcctcgtcagaagaactgtttgattgatcgaaccagtagaaaccgctgccaacactgtcgattacagaaatgccttgccgtagggatgtctcgagatgctgtaaaatttggccgaatgtcaaaaaagcagagagacagcttgtatgcagaagtacagaaacaccggatgcagcagcagcagcgcgaccaccagcagcagcctggagaggctgagccgctgacgcccacctacaacatctcggccaacgggctgacggaacttcacgacgacctcagtaactacattgacgggcacacccctgaggggagtaaggcagactccgccgtcagcagcttctacctggacatacagccttccccagaccagtcaggtcttgatatcaatggaatcaaaccagaaccaatatgtgactacacaccagcatcaggcttctttccctactgttcgttcaccaacggcgagacttccccaactgtgtccatggcagaattagaacaccttgcacagaatatatctaaatcgcatctggaaacctgccaatacttgagagaagagctccagcagataacgtggcagacctttttacaggaagaaattgagaactatcaaaacaagcagcgggaggtgatgtggcaattgtgtgccatcaaaattacagaagctatacagtatgtggtggagtttgccaaacgcattgatggatttatggaactgtgtcaaaatgatcaaattgtgcttctaaaagcaggttctctagaggtggtgtttatcagaatgtgccgtgcctttgactctcagaacaacaccgtgtactttgatgggaagtatgccagccccgacgtcttcaaatccttaggttgtgaagactttattagctttgtgtttgaatttggaaagagtttatgttctatgcacctgactgaagatgaaattgcattattttctgcatttgtactgatgtcagcagatcgctcatggctgcaagaaaaggtaaaaattgaaaaactgcaacagaaaattcagctagctcttcaacacgtcctacagaagaatcaccgagaagatggaatactaacaaagttaatatgcaaggtgtctaccttaagagccttatgtggacgacatacagaaaagctaatggcatttaaagcaatatacccagacattgtgcgacttcattttcctccattatacaaggagttgttcacttcagaatttgagccagcaatgcaaattgatgggtaa

SEQ ID NO: 720 - DNA, 726 bp, Homo sapiens
  source 1..726: mol_type = genomic DNA
atgtccatgttgttctacactctgatcacagcttttctgatcggcatacaggcggaaccacactcagagagcaatgtccctgcaggacacaccatcccccaagcccactggactaaacttcagcattcccttgacactgcccttcgcagagcccgcagcgccccggcagcggcgatagctgcacgcgtggcggggcagacccgcaacattactgtggaccccaggctgtttaaaaagcggcgactccgttcaccccgtgtgctgtttagcacccagcctccccgtgaagctgcagacactcaggatctggacttcgaggtcggtggtgctgcccccttcaacaggactcacaggagcaagcggtcatcatcccatcccatcttccacaggggcgaattctcggtgtgtgacagtgtcagcgtgtgggttggggataagaccaccgccacagacatcaagggcaaggaggtgatggtgttgggagaggtgaacattaacaacagtgtattcaaacagtacttttttgagaccaagtgccgggacccaaatcccgttgacagcgggtgccggggcattgactcaaagcactggaactcatattgtaccacgactcacacctttgtcaaggcgctgaccatggatggcaagcaggctgcctggcggtttatccggatagatacggcctgtgtgtgtgtgctcagcaggaaggctgtgagaagagcctga

SEQ ID NO: 721 - DNA, 2112 bp, Homo sapiens
  source 1..2112: mol_type = genomic DNA
atgctggggactctgacacccctgtcttcgctgctgctgctgctactggtgctggtgctggggtgtgggccgcgggcgtcctctggtggcggggccggtggggcggcgggctatgccccagtgaagtacatccagcccatgcagaaaggacctgtgggaccgcccttccgtgagggcaaaggccagtacctggaaatgcctctaccgctgctgccgatggacctgaagggagagcccggcccccctgggaagcccgggcctcggggtccccctggcccccctggcttcccaggaaaaccaggcatgggaaagccaggactccatgggcagcctggccctgctgggccccctggcttctcccggatgggcaaggctggtcccccagggctccctggcaaggtcgggccaccagggcagccggggcttcggggggagccaggaatacgaggggaccagggcctccggggacccccaggaccccctggcctcccgggcccctcaggcattactatccctggaaaaccaggtgcccaaggggtgccagggcccccaggattccagggggaaccagggccccagggggagcctgggcccccaggtgatcgaggcctcaagggggataatggagtgggccagcccgggctgcctggggccccagggcaggggggtgcccccggcccccccggcctccctggtccagctggcttaggcaaacctggtttggatgggcttcctggggccccaggagacaagggtgagtctgggcctcctggagttccaggccccaggggggagccaggagctgtgggcccaaaaggacctcctggagtagacggtgtgggagtcccaggggcagcagggttgccaggaccacagggcccatcaggggccaaaggggagccagggacccggggcccccctgggctgataggccccactggctatgggatgccaggactgccaggccccaagggggacaggggcccagctggggtcccaggactcttgggggacaggggtgagccaggggaggatggggagccaggggagcagggcccacagggtcttgggggtccccctggacttcctgggtctgcagggcttcctggcagacgtgggccccctgggcctaagggtgaggcagggcctggaggacccccaggagtgcctggcattcgaggtgaccaggggcctagtggcctggctgggaaaccaggggtcccaggtgagaggggacttcctggggcccatggaccccctggaccaactgggcccaagggtgagccgggtttcacgggtcgccctggaggaccaggggtggcaggagccctggggcagaaaggtgacttggggctccctgggcagcctggcctgaggggtccctcaggaatcccaggactccagggtccagctggccctattgggccccaaggcctgccgggcctgaagggggaaccaggcctgccagggccccctggagaggggagagcaggggaacctggcacggctgggcccacggggcccccaggggtccctggctcccctggaatcacgggccctccggggcctcccgggcccccgggaccccctggtgcccctggggccttcgatgagactggcatcgcaggcttgcacctgcccaacggcggtgtggagggtgccgtgctgggcaaggggggcaagccacagtttgggctgggcgagctgtctgcccatgccacaccggccttcactgcggtgctcacctcgcccttccccgcctcgggcatgcccgtgaaatttgaccggactctctacaatggccacagcggctacaacccagccactggcatcttcacctgccctgtgggcggcgtctactactttgcttaccatgtgcacgtcaagggcaccaacgtgtgggtggccctgtacaagaacaacgtgccggccacctatacctacgatgagtacaagaagggctacctggaccaggcatctggtggggccgtgctccagctgcggcccaacgaccaggtctgggtgcagatgccgtcggaccaggccaacggcctctactccacggagtacatccactcctccttttcaggattcttgctctgccccacataa

SEQ ID NO: 722 - DNA, 2628 bp, Homo sapiens
  source 1..2628: mol_type = genomic DNA
atggccgcggccaccaggcgcgtgttccatctgcagccgtgcgaaaactctcccaccatgtcgcagaatggatacttcgaggattcaagctactacaagtgtgacacagatgacaccttcgaagcccgagaggagatcctgggggatgaggccttcgacactgccaactcctccatcgtgtctggcgagagtatccgtttttttgtcaatgtcaaccttgagatgcaggccaccaacactgagaatgaagcgacttccggtggctgtgtgctcctgcacacctcccgaaagtacctgaagttaaagaacttcaaggaagagatccgtgcgcaccgcgacctagatggcttcctggcgcaggccagcatcgtcctgaacgagacggccacctccctggataacgtgctgcggaccatgcttcgccgcttcgccagggaccctgacaacaatgagcccaactgcaacctggacctgctcatggccatgctcttcaccgatgccggggcacccatgcggggtaaagtccacctgctgtcagataccatccaaggggtcaccgccacagtgacaggggtgcggtaccagcagtcgtggctctgcatcatctgtaccatgaaggccctacagaagcggcacgtgtgcatcagccgcctggttcgcccacagaactggggggagaattcctgtgaggttcggttcgtcatcctggtgctggccccacccaagatgaaaagcactaagactgcgatggaggtggcgcgcacgtttgccaccatgttctcggatatcgccttccgccagaagctcctggagacccgcacagaggaggaattcaaggaggccttggtgcatcagagacagctgctcaccatggtgagccacggtccagtggcgccgagaacgaaggaacgcagcacagtctccctccctgcccacagacacccagagcccccaaagtgcaaggactttgtcccttttgggaagggcatccgggaggacatcgcacgcaggttccccttgtaccccttggacttcactgatggcattattgggaaaaacaaggctgtgggcaaatacatcaccaccaccctgttcctctacttcgcctgcctcctgcccaccatcgctttcgggtctctcaatgacgagaacacagacggggccatcgacgtgcagaagaccatagccgggcagagcatcgggggcctgctctacgcgctcttctctgggcagccattggtgattctgctgaccaccgcgcccctggcgctctacatccaggtgattcgtgtcatctgtgatgactatgacctggacttcaactccttctacgcatggacgggcctgtggaatagtttcttccttgcgctttatgcctttttcaacctcagcctggtcatgagtctcttcaagaggtcgacggaggagatcatcgccctcttcatttccatcacgtttgtgctggatgccgtcaagggcacggttaaaatcttctggaagtactactatgggcattacttggacgactatcacacaaaaaggacttcatcccttgtcagcctgtcaggcctcggcgccagcctcaacgccagcctccacactgccctcaacgccagcttcctcgccagccccacggagctgccctcggccacacactcaggccaggcgaccgccgtgctcagcctcctcatcatgctgggcacgctctggctgggctacaccctctaccaattcaagaagagcccctacctgcacccctgcgtgcgagagatcctgtccgactgcgccctgcccatcgcggtgctcgccttctccctcatcagctcccatggcttccgggaaatcgagatgagcaagttccgctacaaccccagcgagagcccctttgcgatggcgcagatccagtcgctgtccctgagggccgtcagcggtgccatgggcctcggcttcctgctgtccatgctcttcttcatcgagcagaacttggtggccgccttggtgaatgcaccggagaacaggctggtgaagggcactgcctaccactgggacctcctgctcctcgccatcatcaacacagggctgtctctgtttgggctgccttggatccatgccgcctacccccactccccgctgcacgtgcgagccctggccttagtggaggagcgtgtggagaacggacacatctatgacacgattgtgaacgtgaaggagacgcggctgacctcgctgggcgccagcgtcctggtgggcctgtccctgttgctgctgccggtcccgcttcagtggatccccaagcccgtgctctatggcctcttcctctacatcgcgctcacctccctcgatggcaaccagctcgtccagcgcgtggccctgctgctcaaggagcagactgcgtaccccccgacacactacatccggagggtgccccagaggaagatccactacttcacgggcctgcaggtgcttcagctgctgctgctgtgtgccttcggcatgagctccctgccctacatgaagatgatctttcccctcatcatgatcgccatgatccccatccgctatatcctgctgccccgaatcattgaagccaagtacttggatgtcatggacgctgagcacaggccttga

SEQ ID NO: 723 - DNA, 3375 bp, Homo sapiens
  source 1..3375: mol_type = genomic DNA
atggcggatggccccaggtgtaagcgcagaaagcaggcgaacccgcggcgcaataacgttacaaattataatactgtggtagaaacaaattcagattcagatgatgaagacaaactgcatattgtggaagaagaaagtgttacagatgcagctgactgtgaaggtgtaccagaggatgacctgccaacagaccagacagtgttaccagggaggagcagtgaaagagaagggaatgctaagaactgctgggaggatgacagaaaggaagggcaagaaatcctggggcctgaagctcaggcagatgaagcaggatgtacagtaaaagatgatgaatgcgagtcagatgcagaaaatgagcaaaaccatgatcctaatgttgaagagtttctacaacaacaagacactgctgtcatttttcctgaggcacctgaagaggaccagaggcagggcacaccagaagccagtggtcatgatgaaaatggaacaccagatgcattttcacaattactcacctgtccatattgtgatagaggctataaacgctttacctctctgaaagaacacattaaatatcgtcatgaaaagaatgaagataactttagttgctccctgtgcagttacacctttgcatacagaacccaacttgaacgtcacatgacatcacataaatcaggaagagatcaaagacatgtgacgcagtctgggtgtaatcgtaaattcaaatgcactgagtgtggaaaagctttcaaatacaaacatcacctaaaagagcacttaagaattcacagtggagagaagccatatgaatgcccaaactgcaagaaacgcttttcccattctggctcctatagctcacacataagcagtaagaaatgtatcagcttgatacctgtgaatgggcgaccaagaacaggactcaagacatctcagtgttcttcaccgtctctttcagcatcaccaggcagtcccacacgaccacagatacggcaaaagatagagaataaaccccttcaagaacaactttctgttaaccaaattaaaactgaacctgtggattatgaattcaaacccatagtggttgcttcaggaatcaactgttcaacccctttacaaaatggggttttcactggtggtggcccattacaggcaaccagttctcctcagggcatggtgcaagctgttgttctgccaacagttggtttggtgtctcccataagtatcaatttaagtgatattcagaatgtacttaaagtggcggtagatggtaatgtaataaggcaagtgttggagaataatcaagccaatcttgcatccaaagaacaagaaacaatcaatgcttcacccatacaacaaggtggccattctgttatttcagccatcagtcttcctttggttgatcaagatggaacaaccaaaattatcatcaactacagtcttgagcagcctagccaacttcaagttgttcctcaaaatttaaaaaaagaaaatccagtcgctacaaacagttgtaaaagtgaaaagttaccagaagatcttactgttaagtctgagaaggacaaaagctttgaagggggggtgaatgatagcacttgtcttctgtgtgatgattgtccaggagatattaatgcacttccagaattaaagcactatgacctaaagcagcctactcagcctcctccactccctgcagcagaagctgagaagcctgagtcctctgtttcatcagctactggagatggcaatttgtctcctagtcagccacctttaaagaacctcttgtctctcctaaaagcatattatgctttgaatgcacaaccaagtgcagaagagctctcaaaaattgctgattcagtaaacctaccactggatgtagtaaaaaagtggtttgaaaagatgcaagctggacagatttcagtgcagtcttctgaaccatcttctcctgaaccaggcaaagtaaatatccctgccaagaacaatgatcagcctcaatctgcaaatgcaaatgaaccccaggacagcacagtaaatctacaaagtcctttgaagatgactaactccccagttttaccagtgggatcaaccaccaatggttccagaagtagtacaccatccccatcacctctaaacctttcctcatccagaaatacacagggttacttgtacacagctgagggtgcacaagaagagccacaagtagaacctcttgatctttcactaccaaagcaacagggagaattattagaaaggtcaactatcactagtgtttaccagaacagtgtttattctgtccaggaagaacccttgaacttgtcttgcgcaaaaaaggagccacaaaaggacagttgtgttacagactcagaaccagttgtaaatgtaatcccaccaagtgccaaccccataaatatcgctatacctacagtcactgcccagttacccacaatcgtggccattgctgaccagaacagtgttccatgcttaagagcgctagctgccaataagcaaacgattctgattccccaggtggcatacacctactcaactacggtcagccctgcagtccaagaaccacccttgaaagtgatccagccaaatggaaatcaggatgaaagacaagatactagctcagaaggagtatcaaatgtagaggatcagaatgactctgattctacaccgcccaaaaagaaaatgcggaagacagaaaatggaatgtatgcttgtgatttgtgtgacaagatattccaaaagagtagttcattattgagacataaatatgaacacacaggtaaaagacctcatgagtgtggaatctgtaaaaaggcatttaaacacaaacatcatttgattgaacacatgcgattacattctggagaaaagccctatcaatgtgacaaatgtggaaagcgcttctcacactctgggtcttattctcaacacatgaatcatcgctactcctactgtaagagagaagcggaagaacgtgacagcacagagcaggaagaggcagggcctgaaatcctctcgaatgagcacgtgggtgccagggcgtctccctcacagggcgactcggacgagagagagagtttgacaagggaagaggatgaagacagtgaaaaagaggaagaggaggaggataaagagatggaagaattgcaggaagaaaaagaatgtgaaaaaccacaaggggatgaggaagaggaggaggaggaggaagaagtggaagaagaagaggtagaagaggcagagaatgagggagaagaagcaaaaactgaaggtctgatgaaggatgacagggctgaaagtcaagcaagcagcttaggacaaaaagtaggcgagagtagtgagcaagtgtctgaagaaaagacaaatgaagcctaa

SEQ ID NO: 724 - DNA, 1482 bp, Homo sapiens
  source 1..1482: mol_type = genomic DNA
atgacctgtggcttcaactccataggctgtgggttccgccctggaaacttcagctgtgtctctgcctgcgggccccggccaagccgctgctgcatcaccgccgccccctaccgcggcatctcctgctaccgcggcctcaccgggggctttggcagccacagcgtgtgcgggggcttccgcgccggctcctgcggacgcagcttcggctaccgctccgggggcgtgtgcggacccagccccccatgcatcaccaccgtgtcggtcaacgagagcctcctcacgcccctcaacctggagatagaccccaacgcgcagtgcgtgaagcaggaggagaaggagcagatcaagtccctcaacagcagattcgcggccttcatcgacaaggtgcgcttcctggagcagcagaacaagctgctggagacaaagctgcagttctaccaaaaccgcgagtgctgccagagtaacctggagcccctgtttgctggctacatcgagactctgcggcgggaggccgagtgcgtggaggctgacagtgggaggctggcctcagagctcaaccacgtgcaggaggtgctggagggctacaagaagaagtatgaagaagaagtagcacttcgagccacagcagagaacgagtttgtggctctaaagaaggatgtggactgcgcctacctccgcaagtcagacctggaggccaacgtggaggccctgatccaggagattgacttcctgaggcggctgtacgaggaggagatccgcattctccaatcccacatctcagacacctccgtggttgtcaagctggacaacagccgggacctgaacatggactgcatcgttgccgagatcaaggcacagtatgatgacattgccacccgtagccgggctgaggccgagtcctggtatcgcagcaagtgtgaggagatgaaggccacagtgatcaggcacggggagaccctgcgccgcaccaaggaggagatcaacgagctgaaccgcatgatccagaggctgacagccgaggtggagaatgccaagtgccagaactccaagctggaagctgcggtggcccagtctgagcagcagggtgaggcggccctcagtgatgcccgctgcaagctggccgagctggagggcgccctgcagaaggccaagcaagacatggcctgcctgatcagggagtaccaggaggtgatgaactccaagctaggcctggatatcgagatcgccacctacaggcgcctgctggagggcgaggagcagaggctgtgtgaaggtgttgaagctgtgaatgtctgtgtcagcagctcccggggtggggttgtgtgcggggatctctgcgtgtcgggctcccggccggtgacgggcagcgtctgcagtgccccctgcaacgggaacctggtggtgagcactggtttgtgcaagccctgtggccagctgaacaccacctgtggagggggctcctgcggccaggggaggcattaa

SEQ ID NO: 725 - DNA, 1485 bp, Homo sapiens
  source 1..1485: mol_type = genomic DNA
atggatctctccaacaacaccatgtcactctcagtgcgcacccccggactgtcccggcggctctcctcgcagagtgtgataggcagacccaggggcatgtctgcttccagtgttggaagtggttatgggggaagtgcctttggctttggagccagctgtgggggaggcttttctgctgcttccatgtttggttctagttccggctttgggggtggctccggaagttccatggcaggaggactgggtgctggttatgggagagccctgggtggaggtagctttggagggctggggatgggatttgggggcagcccaggaggtggctctctaggtattctctcgggcaatgatggaggccttctttctggatcagaaaaagaaactatgcaaaatcttaatgatagattagcttcctacctggataaggtgcgagctctagaagaggctaatactgagctagaaaataaaattcgagaatggtatgaaacacgaggaactgggactgcagatgcttcacagagcgattacagcaaatattatccactgattgaagacctcaggaataagatcatttcagccagcattggaaatgcccagctcctcttgcagattgacaatgcgagactagctgctgaggacttcaggatgaagtatgagaatgaactggccctgcgccagggcgtagaggccgacatcaatggcctgcgccgggtgctggacgagctgaccctgaccaggaccgacctggagatgcagatcgagagcctgaacgaggagctggcctacatgaagaagaaccacgaggatgagctccaaagcttccgggtgggcggcccaggcgaggtcagcgtagaaatggacgctgcccccggagtggacctcaccaggctcctcaatgatatgcgggcgcagtatgaaaccatcgctgagcagaatcggaaggacgctgaagcctggttcattgaaaagagcggggagctccgtaaggagattagcaccaacaccgagcagcttcagtccagcaagagcgaggtcaccgacctgcgtcgcgcctttcagaacctggagatcgagctacagtcccagctcgccatgaagaaatccctggaggactccttggccgaagccgagggcgattactgcgcgcagctgtcccaggtgcagcagctcatcagcaacctggaggcacagctgctccaggtgcgcgcggacgcagagcgccagaacgtggaccaccagcggctgctgaatgtcaaggcccgcctggagctggagattgagacctaccgccgcctgctggacggggaggcccaaggtgatggtttggaggaaagtttatttgtgacagactccaaatcacaagcacagtcaactgattcctctaaagacccaaccaaaacccgaaaaatcaagacagttgtgcaggagatggtgaatggtgaggtggtctcatctcaagttcaggaaattgaagaactaatgtaa

SEQ ID NO: 726 - DNA, 2052 bp, Homo sapiens
  source 1..2052: mol_type = genomic DNA
atggcgctcttcgtgcggctgctggctctcgccctggctctggccctgggccccgccgcgaccctggcgggtcccgccaagtcgccctaccagctggtgctgcagcacagcaggctccggggccgccagcacggccccaacgtgtgtgctgtgcagaaggttattggcactaataggaagtacttcaccaactgcaagcagtggtaccaaaggaaaatctgtggcaaatcaacagtcatcagctacgagtgctgtcctggatatgaaaaggtccctggggagaagggctgtccagcagccctaccactctcaaacctttacgagaccctgggagtcgttggatccaccaccactcagctgtacacggaccgcacggagaagctgaggcctgagatggaggggcccggcagcttcaccatcttcgcccctagcaacgaggcctgggcctccttgccagctgaagtgctggactccctggtcagcaatgtcaacattgagctgctcaatgccctccgctaccatatggtgggcaggcgagtcctgactgatgagctgaaacacggcatgaccctcacctctatgtaccagaattccaacatccagatccaccactatcctaatgggattgtaactgtgaactgtgcccggctgctgaaagccgaccaccatgcaaccaacggggtggtgcacctcatcgataaggtcatctccaccatcaccaacaacatccagcagatcattgagatcgaggacacctttgagacccttcgggctgctgtggctgcatcagggctcaacacgatgcttgaaggtaacggccagtacacgcttttggccccgaccaatgaggccttcgagaagatccctagtgagactttgaaccgtatcctgggcgacccagaagccctgagagacctgctgaacaaccacatcttgaagtcagctatgtgtgctgaagccatcgttgcggggctgtctgtagagaccctggagggcacgacactggaggtgggctgcagcggggacatgctcactatcaacgggaaggcgatcatctccaataaagacatcctagccaccaacggggtgatccactacattgatgagctactcatcccagactcagccaagacactatttgaattggctgcagagtctgatgtgtccacagccattgaccttttcagacaagccggcctcggcaatcatctctctggaagtgagcggttgaccctcctggctcccctgaattctgtattcaaagatggaacccctccaattgatgcccatacaaggaatttgcttcggaaccacataattaaagaccagctggcctctaagtatctgtaccatggacagaccctggaaactctgggcggcaaaaaactgagagtttttgtttatcgtaatagcctctgcattgagaacagctgcatcgcggcccacgacaagagggggaggtacgggaccctgttcacgatggaccgggtgctgacccccccaatggggactgtcatggatgtcctgaagggagacaatcgctttagcatgctggtagctgccatccagtctgcaggactgacggagaccctcaaccgggaaggagtctacacagtctttgctcccacaaatgaagccttccgagccctgccaccaagagaacggagcagactcttgggagatgccaaggaacttgccaacatcctgaaataccacattggtgatgaaatcctggttagcggaggcatcggggccctggtgcggctaaagtctctccaaggtgacaagctggaagtcagcttgaaaaacaatgtggtgagtgtcaacaaggagcctgttgccgagcctgacatcatggccacaaatggcgtggtccatgtcatcaccaatgttctgcagcctccagccaacagacctcaggaaagaggggatgaacttgcagactctgcgcttgagatcttcaaacaagcatcagcgttttccagggcttcccagaggtctgtgcgactagcccctgtctatcaaaagttattagagaggatgaagcattag

SEQ ID NO: 727 - DNA, 972 bp, Homo sapiens
  source 1..972: mol_type = genomic DNA
atggctcggggccccggcctcgcgccgccaccgctgcggctgccgctgctgctgctggtgctggcggcggtgaccggccacacggccgcgcaggacaactgcacgtgtcccaccaacaagatgaccgtgtgcagccccgacggccccggcggccgctgccagtgccgcgcgctgggctcgggcatggcggtcgactgctccacgctgacctccaagtgtctgctgctcaaggcgcgcatgagcgcccccaagaacgcccgcacgctggtgcggccgagtgagcacgcgctcgtggacaacgatggcctctacgaccccgactgcgaccccgagggccgcttcaaggcgcgccagtgcaaccagacgtcggtgtgctggtgcgtgaactcggtgggcgtgcgccgcacggacaagggcgacctgagcctacgctgcgatgagctggtgcgcacccaccacatcctcattgacctgcgccaccgccccaccgccggcgccttcaaccactcagacctggacgccgagctgaggcggctcttccgcgagcgctatcggctgcaccccaagttcgtggcggccgtgcactacgagcagcccaccatccagatcgagctgcggcagaacacgtctcagaaggccgccggtgacgtggatatcggcgatgccgcctactacttcgagagggacatcaagggcgagtctctattccagggccgcggcggcctggacttgcgcgtgcgcggagaacccctgcaggtggagcgcacgctcatctattacctggacgagattcccccgaagttctccatgaagcgcctcaccgccggcctcatcgccgtcatcgtggtggtcgtggtggccctcgtcgccggcatggccgtcctggtgatcaccaaccggagaaagtcggggaagtacaagaaggtggagatcaaggaactgggggagttgagaaaggaaccgagcttgtag

SEQ ID NO: 728 - DNA, 1188 bp, Homo sapiens
  source 1..1188: mol_type = genomic DNA
atgtggctgccgcgcgtctccagcacagcagtgaccgcgctcctcctggcgcagaccttcctcctcctctttctggtttcccggccagggccctcgtccccagcaggcggcgaggcgcgcgtgcatgtgctggtgctgtcctcgtggcgctcgggctcgtccttcgtgggccaactcttcaaccagcaccccgacgtcttctacctaatggagcccgcgtggcacgtgtggaccaccctgtcgcagggcagcgccgcaacgctgcacatggctgtgcgcgacctggtgcgctccgtcttcctgtgcgacatggacgtgtttgatgcctatctgccttggcgccgcaacctgtccgacctcttccagtgggccgtgagccgtgcactgtgctcgccacccgcctgcagtgcctttccccgaggcgccatcagcagcgaggccgtgtgcaagccactgtgcgcgcggcagtccttcaccctggcccgggaggcctgccgctcctacagccacgtggtgctcaaggaggtgcgcttcttcaacctgcaggtgctctacccgctgctcagcgaccccgcgctcaacctacgcatcgtgcacctggtgcgcgacccgcgggccgtgctgcgctcccgggagcagacagccaaggctctggcgcgtgacaacggcatcgtgctgggcaccaacggcacgtgggtggaggccgaccccggcctgcgcgtggtgcgcgaggtgtgccgtagccacgtacgcatcgccgaggccgccacactcaagccgccaccctttctgcgcggccgctaccgcctggtgcgcttcgaggacctggcgcgggagccgctggcagaaatccgtgcgctctacgccttcactgggctcagtctcacgccacagctcgaggcctggatccataacatcacccacggatctggacctggtgcgcgccgcgaagccttcaagacttcgtccaggaatgcgctcaacgtctcccaggcctggcgccatgcgctgccctttgccaagatccgccgcgtgcaggaactgtgcgctggtgcgctgcagctgctgggctaccggcctgtgtactctgaggacgagcagcgcaacctcgcccttgatctggtgctgccacgaggcctgaacggcttcacttgggcatcatccaccgcctcgcacccccgaaattag

SEQ ID NO: 729 - DNA, 2349 bp, Homo sapiens
  source 1..2349: mol_type = genomic DNA
atggctccgcaccgccccgcgcccgcgctgctttgcgcgctgtccctggcgctgtgcgcgctgtcgctgcccgtccgcgcggccactgcgtcgcggggggcgtcccaggcgggggcgccccaggggcgggtgcccgaggcgcggcccaacagcatggtggtggaacaccccgagttcctcaaggcagggaaggagcctggcctgcagatctggcgtgtggagaagttcgatctggtgcccgtgcccaccaacctttatggagacttcttcacgggcgacgcctacgtcatcctgaagacagtgcagctgaggaacggaaatctgcagtatgacctccactactggctgggcaatgagtgcagccaggatgagagcggggcggccgccatctttaccgtgcagctggatgactacctgaacggccgggccgtgcagcaccgtgaggtccagggcttcgagtcggccaccttcctaggctacttcaagtctggcctgaagtacaagaaaggaggtgtggcatcaggattcaagcacgtggtacccaacgaggtggtggtgcagagactcttccaggtcaaagggcggcgtgtggtccgtgccaccgaggtacctgtgtcctgggagagcttcaacaatggcgactgcttcatcctggacctgggcaacaacatccaccagtggtgtggttccaacagcaatcggtatgaaagactgaaggccacacaggtgtccaagggcatccgggacaacgagcggagtggccgggcccgagtgcacgtgtctgaggagggcactgagcccgaggcgatgctccaggtgctgggccccaagccggctctgcctgcaggtaccgaggacaccgccaaggaggatgcggccaaccgcaagctggccaagctctacaaggtctccaatggtgcagggaccatgtccgtctccctcgtggctgatgagaaccccttcgcccagggggccctgaagtcagaggactgcttcatcctggaccacggcaaagatgggaaaatctttgtctggaaaggcaagcaggcaaacacggaggagaggaaggctgccctcaaaacagcctctgacttcatcaccaagatggactaccccaagcagactcaggtctcggtccttcctgagggcggtgagaccccactgttcaagcagttcttcaagaactggcgggacccagaccagacagatggcctgggcttgtcctacctttccagccatatcgccaacgtggagcgggtgcccttcgacgccgccaccctgcacacctccactgccatggccgcccagcacggcatggatgacgatggcacaggccagaaacagatctggagaatcgaaggttccaacaaggtgcccgtggaccctgccacatatggacagttctatggaggcgacagctacatcattctgtacaactaccgccatggtggccgccaggggcagataatctataactggcagggtgcccagtctacccaggatgaggtcgctgcatctgccatcctgactgctcagctggatgaggagctgggaggtacccctgtccagagccgtgtggtccaaggcaaggagcccgcccacctcatgagcctgtttggtgggaagcccatgatcatctacaagggcggcacctcccgcgagggcgggcagacagcccctgccagcacccgcctcttccaggtccgcgccaacagcgctggagccacccgggctgttgaggtattgcctaaggctggtgcactgaactccaacgatgcctttgttctgaaaaccccctcagccgcctacctgtgggtgggtacaggagccagcgaggcagagaagacgggggcccaggagctgctcagggtgctgcgggcccaacctgtgcaggtggcagaaggcagcgagccagatggcttctgggaggccctgggcgggaaggctgcctaccgcacatccccacggctgaaggacaagaagatggatgcccatcctcctcgcctctttgcctgctccaacaagattggacgttttgtgatcgaagaggttcctggtgagctcatgcaggaagacctggcaacggatgacgtcatgcttctggacacctgggaccaggtctttgtctgggttggaaaggattctcaagaagaagaaaagacagaagccttgacttctgctaagcggtacatcgagacggacccagccaatcgggatcggcggacgcccatcaccgtggtgaagcaaggctttgagcctccctcctttgtgggctggttccttggctgggatgatgattactggtctgtggaccccttggacagggccatggctgagctggctgcctga

SEQ ID NO: 730 - DNA, 1017 bp, Homo sapiens
  source 1..1017: mol_type = genomic DNA
atggcggcctctcaggtcctgggggagaagattaacatcctgtcgggagagactgtcaaagctggggacagggacccgctggggaacgactgtcccgagcaagataggctcccccagcgctcctggaggcagaagtgtgcctcctacgtgttggccctgaggccctggagcttcagtgcctcactcacaccggtggccctgggcagtgcccttgcctacagatcccacggtgtcctggatcccaggctcttggtgggttgtgccgtggctgtcctggctgtgcacggggccggtaatttggtcaacacttactatgacttttccaagggcattgaccacaaaaagagtgatgacaggacacttgtggaccgaatcttggagccgcaggatgtcgtccggttcggagtcttcctctacacgttgggctgcgtctgtgccgcttgcctctactacctgtcccctctgaaactggagcacttggctcttatctactttggaggcctgtctggctcctttctctacacaggaggaattggattcaagtacgtggctctgggagacctcatcatcctcatcacttttggcccgctggctgtgatgttcgcctacgccatccaggtggggtccctggccatcttcccactggtctatgccatccccctcgccctcagcaccgaggccattctccattccaacaacaccagggacatggagtccgaccgggaggctggtatcgtcacgctggccatcctcatcggccccacgttctcctacattctctacaacacactgctcttcctgccctacctggtcttcagcatcctggccacacactgcaccatcagcctggcactccccctgcttaccattcccatggccttctcccttgagagacagtttcgaagccaggccttcaacaaactgccccagaggactgccaagctcaacctcctgctgggacttttctatgtctttggcatcattctggcaccagcaggcagtctgcccaaaatttaa

SEQ ID NO: 731 - DNA, 1080 bp, Homo sapiens
  source 1..1080: mol_type = genomic DNA
atgaaggccactatcatcctccttctgcttgcacaagtttcctgggctggaccgtttcaacagagaggcttatttgactttatgctagaagatgaggcttctgggataggcccagaagttcctgatgaccgcgacttcgagccctccctaggcccagtgtgccccttccgctgtcaatgccatcttcgagtggtccagtgttctgatttgggtctggacaaagtgccaaaggatcttccccctgacacaactctgctagacctgcaaaacaacaaaataaccgaaatcaaagatggagactttaagaacctgaagaaccttcacgcattgattcttgtcaacaataaaattagcaaagttagtcctggagcatttacacctttggtgaagttggaacgactttatctgtccaagaatcagctgaaggaattgccagaaaaaatgcccaaaactcttcaggagctgcgtgcccatgagaatgagatcaccaaagtgcgaaaagttactttcaatggactgaaccagatgattgtcatagaactgggcaccaatccgctgaagagctcaggaattgaaaatggggctttccagggaatgaagaagctctcctacatccgcattgctgataccaatatcaccagcattcctcaaggtcttcctccttcccttacggaattacatcttgatggcaacaaaatcagcagagttgatgcagctagcctgaaaggactgaataatttggctaagttgggattgagtttcaacagcatctctgctgttgacaatggctctctggccaacacgcctcatctgagggagcttcacttggacaacaacaagcttaccagagtacctggtgggctggcagagcataagtacatccaggttgtctaccttcataacaacaatatctctgtagttggatcaagtgacttctgcccacctggacacaacaccaaaaaggcttcttattcgggtgtgagtcttttcagcaacccggtccagtactgggagatacagccatccaccttcagatgtgtctacgtgcgctctgccattcaactcggaaactataagtaa

SEQ ID NO: 732 - DNA, 6297 bp, Homo sapiens
  source 1..6297: mol_type = genomic DNA
atggccacagatgataagacgtccccaacactggactctgctaatgatttgcctcgatctcctactagtccttctcatctcacacactttaaacctttgactcctgatcaagatgagcccccttttaaatcagcttatagttcttttgtaaatctctttcgttttaacaaagagagagcagaaggaggccagggagaacagcagcctttgagtggaagttggaccagccctcagctcccttcgaggacacagtctgttaggtcacccacaccttataaaaagcagcttaatgaggaactccagcggcgctcttcagcattagacacaagaaggaaagcagaacctacctttggaggtcatgaccctcgtacagctgttcagcttcgaagcctcagcacagtattaaaacgcctcaaggaaatcatggaggggaaaagccaggatagtgacctgaaacaatactggatgccagatagccaatgtaaagagtgctatgactgtagtgagaaatttacaacctttaggcgcagacaccattgccgactatgtgggcagattttctgcagtcgttgctgtaatcaagaaatccctggaaaatttatgggctatacaggagacctccgagcttgcacatattgtagaaaaatagccttaagttatgctcattccacagacagtaattctattggggaagacttgaatgctctttcagattctgcttgctctgtgtctgtgcttgatccaagtgaaccccgaacacctgttgggagtaggaaagccagccgtaacatatttttagaggatgatttggcctggcaaagtttgattcatccagattcctcaaatactcctctttcaacaagacttgtatctgtgcaagaggatgctgggaaatctcctgctcgaaatagatcagccagcattactaacctgtcactggatagatctggttctcctatggtaccttcatatgagacatctgtcagtccccaggctaaccgaacatatgttaggacagagaccactgaggatgaacgcaaaattcttctggacagtgtgcagttaaaagacctgtggaaaaaaatctgccatcacagcagtggaatggagtttcaggatcaccgctactggttgagaacgcatcccaactgcattgtaggaaaggaattagtcaactggctaatccgaaatgggcatattgccacaagggcacaagctatagcaattggacaagcaatggttgatggacgttggctggattgtgttagtcatcacgaccagcttttcagagatgagtatgcgctgtatagaccactgcagagtacagaattttctgagacgccttctcccgacagtgactcagtgaactccgtggaaggacactctgagccatcctggtttaaagacataaagtttgatgacagtgacacagaacagatagctgaagaaggtgacgataatttggctaattctgccagtcctagcaagcgcacatcagtcagcagtttccagtccacagtggacagtgactcagccgcttctatcagcctgaacgtggagctggacaacgtgaacttccatatcaagaagccctccaagtacccacatgtgccccctcaccctgctgaccaaaaagagtatttgatttctgacactggaggacaacagctctcaataagtgacgctttcatcaaagaatccttatttaatcgccgagtagaggaaaaatccaaagagctgcctttcacacctttgggctggcatcataacaacctggagctcctgagggaggagaatggggagaaacaagccatggagaggttgctttcagctaatcataaccacatgatggcactactccagcagttgctccatagtgactcactgtcatcatcttggagggacatcatcgtgtcattggtctgccaggttgttcagacagtccgacctgatgtcaagaaccaggatgatgacatggatatccgtcagtttgtccacatcaaaaaaatcccaggtggaaagaagtttgattctgtggttgtcaatggctttgtttgtaccaagaacattgcacataaaaagatgagttcttgtattaaaaaccccaaaattcttctgttgaagtgttccattgagtatctctacagagaagaaactaagtttacttgcattgatcctattgtgcttcaggaaagggaattcttgaagaattatgtccagcgaatagttgatgttcgacccaccttggttcttgttgagaaaacagtgtctcggattgcccaggacatgttattggaacatggcattactttggtcattaatgtaaagtcacaagttttggaacgaatcagtcgaatgacccaaggtgatttagtgatgtcaatggaccagctgcttacgaaaccacacctgggcacttgtcacaaattttatatgcagatatttcagttgcctaatgaacaaaccaagacactgatgttttttgaaggttgtccacagcacctaggctgtacaatcaagctaagaggaggctctgattatgagctggctcgagttaaggagatcctaatatttatgatctgtgttgcttatcattctcaactagaaatatcctttctcatggatgaatttgctatgcctcccacattaatgcaaaacccttcattccattccctgattgagggacgagggcatgagggggctgtccaagagcagtacggtggaggttccatcccctgggatcctgacatccctcctgagtctctgccctgtgatgatagcagtttgctggaattgaggattgtgtttgagaagggtgagcaggaaaataaaaatcttccgcaggctgttgcctctgtgaagcatcaagaacatagcacaacagcttgcccggcgggtctcccttgtgctttctttgcacctgtaccggaatcattgttgccactccctgtggatgaccaacaagatgctttaggcagcgagcagccagagactttgcagcaaacagttgtgctgcaggatcccaaaagccagataagagcctttagagaccctctacaggatgacactggattatatgttactgaggaagtcacctcctctgaagataaacgaaagacttattctttggcctttaagcaggaattaaaagatgtgatcctctgtatctccccagtaatcacattccgagaaccctttcttttaactgaaaaggggatgagatgctctacccgagattattttgcagagcaggtttactggtctcctctcctcaataaagaattcaaagaaatggagaacaggaggaagaaacagctgctcagggatctctctggacttcagggcatgaatggaagtattcaggccaagtctattcaagtcttaccctcacatgagctagtgagcactagaattgctgagcatctgggcgatagccagagcttgggtagaatgctggccgattatcgagccagaggaggaagaattcagcccaaaaattcagacccttttgctcattcaaaggatgcatcaagtacttcaagtggccaatcaggaagcaaaaatgagggtgatgaagagagagggcttattctgagtgatgctgtgtggtcaacaaaggtggactgtctgaatcccattaatcaccagagactttgtgtgctcttcagcagctcttctgcccagtccagcaatgctcctagtgcctgtgtcagtccttggattgtaacaatggaattttatggaaagaatgatcttacattaggaatatttttagagagatactgtttcaggccttcttatcagtgtccaagcatgttctgtgatacccccatggtacatcatattcggcgctttgttcatggccaaggctgtgtgcagataatcctgaaggagttggattctccagtacctggatatcagcatacaattcttacatattcctggtgtagaatctgcaaacaggtaacaccagttgttgctctttccaatgagtcctggtctatgtcatttgcaaaataccttgaacttaggttttatgggcaccagtatactcgcagagccaacgctgagccctgtggtcactccatccatcatgattatcaccagtatttctcctataaccagatggtggcgtctttcagttattctcccattcggcttcttgaagtatgtgttccactccccaaaatattcattaagcgtcaggccccattaaaagtgtcccttcttcaggatctgaaggacttctttcaaaaagtttcacaggtatatgttgccattgatgaaagacttgcatctttgaaaactgatacatttagtaaaacaagagaggaaaaaatggaagatatttttgcacagaaagagatggaagaaggtgagttcaagaactggattgagaagatgcaagcaaggctcatgtcttcctctgtagatacccctcagcaactgcagtcggtctttgagtcactcattgccaagaaacaaagtctctgtgaagtgctgcaagcttggaataacaggttgcaggaccttttccaacaggaaaagggtagaaagagaccttcagttcctccaagtcctggaagactgagacaaggggaagaaagcaagataagtgcgatggatgcatctccacggaatatttctccaggacttcagaatggagaaaaagaggatcgcttcttaacaactttgtccagccagagctccaccagttctactcatctccaattgcctacgccacctgaagtcatgtctgaacagtcagtgggagggccccctgagctagatacagccagcagttccgaagatgtgtttgatgggcatttgctgggatccacagacagccaagtgaaggaaaagtcaaccatgaaagccatctttgcaaatttgcttccaggaaatagctataatcctattccatttccttttgatccagataaacactacttaatgtatgaacatgaacgagtgcccattgcagtctgcgagaaggaacccagctccatcattgcttttgctctcagttgtaaagaataccgaaatgccttagaggaattgtctaaagcgactcagtggaacagtgccgaagaagggcttccaacaaatagtacttcagatagcagaccaaagagtagcagccctatcagattacctgaaatgagtggaggacagacaaatcgtacaacagaaacagaaccacaaccaaccaaaaaggcttctggaatgttgtccttcttcagagggacagcagggaaaagccccgatctctcttcccagaagagagagaccttacgtggagcagatagtgcttactaccaggttgggcagacgggcaaggaggggaccgagaatcaaggcgttgagcctcaagatgaagtagatggaggagatacacaaaagaagcaactcataaatcctcatgtggaacttcaattttcagatgctaatgccaagttttactgtcggctctactatgcgggagagtttcataagatgcgtgaagtgattctggacagcagtgaagaagatttcattcgttccctctcccactcatcaccctggcaggcccggggaggcaaatcaggagctgccttctatgcaactgaggatgatagatttattttgaagcaaatgcctcgtctggaagtccagtccttcctcgactttgcaccacattacttcaattatattacaaatgctgttcaacaaaagaggcccacggcgttggccaaaattcttggagtttacagaattggttataagaactctcagaacaacactgagaagaagttagatctccttgtcatggaaaatcttttctacgggagaaagatggcacaggtttttgatttgaagggctctcttaggaatcggaatgtaaaaactgacactggaaaagagagttgtgatgtggtcctgctagatgaaaatctcctaaagatggttcgagacaaccctctatatattcgttctcattccaaagctgtgctgagaacctcgatccatagtgactcccatttcctttctagccacctcattatagattattctttgctggttgggcgagatgatactagcaatgagctagtagttggaattatagattatattcgaacatttacatgggacaaaaagcttgagatggttgtgaaatcaacaggaattttaggtggacaaggtaaaatgccaacagtggtgtctccggagttgtacaggactaggttttgtgaggcaatggacaagtatttcctaatggtaccagaccactggacaggcttgggtctgaattgctga

SEQ ID NO: 733 - DNA, 828 bp, Homo sapiens
  source 1..828: mol_type = genomic DNA
atgcccaaagtcttcctggtgaagaggaggagcctgggggtctcggtccgcagctgggatgagctcccggatgagaaaagggcagacacctacatcccagtgggcctaggccgcctgctccacgacccccccgaggactgccgcagcgacggcggcagcagcagcggcagcggcagcagcagcgcgggggagcctggaggagcagagagcagctcgtccccgcacgcccccgagagcgaaacccccgagcccggcgacgccgagggccccgatggacacctggcgaccaagcagcgcccggtcgccagatcgaaaatcaagttcaccacaggcacgtgcagcgactcggtggttcacagctgtgacctgtgtggcaagggcttccgtctgcagcgcatgctgaaccgtcacctcaagtgccacaaccaggtgaaaagacacctgtgcaccttctgcggcaagggcttcaacgacaccttcgacctgaagaggcacgtccgcacacacacaggcattcgtccctacaaatgcaacgtctgcaataaagccttcacccagcgctgctctctggagtcccacctgaagaaaatccatggggtgcagcagcagtatgcctataagcagcggcgggacaagctctacgtctgcgaggattgcggctacacgggccccacccaggaggacctgtacctgcacgtgaacagtgcccatccgggcagctcgtttctcaaaaagacatctaaaaaactggcagcccttctgcagggcaagctgacatccgcacaccaggagaataccagcctgagtgaggaggaggagaggaagtga

SEQ ID NO: 734 - DNA, 1878 bp, Homo sapiens
  source 1..1878: mol_type = genomic DNA
atgtcacaagagtcggacaataataaaagactagtggccttagtgcccatgcccagtgaccctccattcaatacccgaagagcctacaccagtgaggatgaagcctggaagtcatacttggagaatcccctgacagcagccaccaaggccatgatgagcattaatggtgatgaggacagtgctgctgccctcggcctgctctatgactactacaaggttcctcgagacaagaggctgctgtctgtaagcaaagcaagtgacagccaagaagaccaggagaaaagaaactgccttggcaccagtgaagcccagagtaatttgagtggaggagaaaaccgagtgcaagtcctaaagactgttccagtgaacctttccctaaatcaagatcacctggagaattccaagcgggaacagtacagcatcagcttccccgagagctctgccatcatcccggtgtcgggaatcacggtggtgaaagctgaagatttcacaccagttttcatggccccacctgtgcactatccccggggagatggggaagagcaacgagtggttatctttgaacagactcagtatgacgtgccctcgctggccacccacagcgcctatctcaaagacgaccagcgcagcactccggacagcacatacagcgagagcttcaaggacgcagccacagagaaatttcggagtgcttcagttggggctgaggagtacatgtatgatcagacatcaagtggcacatttcagtacaccctggaagccaccaaatctctccgtcagaagcagggggagggccccatgacctacctcaacaaaggacagttctatgccataacactcagcgagaccggagacaacaaatgcttccgacaccccatcagcaaagtcaggagtgtggtgatggtggtcttcagtgaagacaaaaacagagatgaacagctcaaatactggaaatactggcactctcggcagcatacggcgaagcagagggtccttgacattgccgattacaaggagagctttaatacgattggaaacattgaagagattgcatataatgctgtttcctttacctgggacgtgaatgaagaggcgaagattttcatcaccgtgaattgcttgagcacagatttctcctcccaaaaaggggtgaaaggacttcctttgatgattcagattgacacatacagttataacaatcgtagcaataaacccattcatagagcttattgccagatcaaggtcttctgtgacaaaggagcagaaagaaaaatccgagatgaagagcggaagcagaacaggaagaaagggaaaggccaggcctcccaaactcaatgcaacagctcctctgatgggaagttggctgccatacctttacagaagaagagtgacatcacctacttcaaaaccatgcctgatctccactcacagccagttctcttcatacctgatgttcactttgcaaacctgcagaggaccggacaggtgtattacaacacggatgatgaacgagaaggtggcagtgtccttgttaaacggatgttccggcccatggaagaggagtttggtccagtgccttcaaagcagatgaaagaagaagggacaaagcgagtgctcttgtacgtgaggaaggagactgacgatgtgttcgatgcattgatgttgaagtctcccacagtgaagggcctgatggaagcgatatctgagaaatatgggctgcccgtggagaagatagcaaagctttacaagaaaagcaaaaaaggcatcttggtgaacatggatgacaacatcatcgagcactactcgaacgaggacaccttcatcctcaacatggagagcatggtggagggcttcaaggtcacgctcatggaaatctag

SEQ ID NO: 735 - DNA, 726 bp, synthetic construct
  source 1..726: mol_type = other DNA
atgagcatgctgttctataccctgatcaccgcctttctgatcggcatccaggccgagcctcacagcgagtctaatgtgcctgccggccacacaatccctcaggctcactggacaaagctgcagcacagcctggatacagctctgcggagagccagatctgctcctgccgctgctattgccgctagagtggctggccagaccagaaacatcacagtggaccccagactgttcaagaagcggcggctgagaagccccagagtgctgttttctacccagcctcctagagaggccgccgacacacaggacctggattttgaagttggcggcgctgcccctttcaacagaacccacagaagcaagcggagcagctctcaccccatcttccacagaggcgagttcagcgtgtgcgactccgtgtctgtgtgggtcggagataagaccaccgccaccgacatcaagggcaaagaagtgatggtcctgggcgaagtgaacatcaacaacagcgtgttcaagcagtacttcttcgagacaaagtgcagggaccccaatcctgtggacagcggctgtagaggcatcgacagcaagcactggaactcctactgcaccaccacacacaccttcgtgaaggccctgaccatggatggaaaacaggccgcctggcggttcatcagaatcgataccgcttgcgtgtgcgtgctgagcagaaaagccgtcagaagggcctga

SEQ ID NO: 736 - DNA, 426 bp, synthetic construct
  source 1..426: mol_type = other DNA
atgtggtggcgactgtggtggctgctgttgctgctgcttctgctgtggcctatggtctgggcctctagctctcaccccatcttccacagaggcgagttcagcgtgtgcgactccgtgtctgtgtgggtcggagataagaccaccgccaccgacatcaagggcaaagaagtgatggtcctgggcgaagtgaacatcaacaacagcgtgttcaagcagtacttcttcgagacaaagtgcagggaccccaatcctgtggacagcggctgtagaggcatcgacagcaagcactggaacagctactgcaccaccacacacaccttcgtgaaggccctgaccatggatggaaaacaggccgcctggcggttcatcagaatcgataccgcttgcgtgtgcgtgctgagcagaaaagctgtgcggagagcctga

SEQ ID NO: 737 - DNA, 6822 bp, synthetic construct
  source 1..6822: mol_type = other DNA
atgggattcgtgcggcagattcagctgctgctgtggaagaactggaccctgcggaagcggcagaaaatcagattcgtggtggaactcgtgtggcccctgagcctgtttctggtgctgatctggctgcggaacgccaatcctctgtacagccaccacgagtgtcacttccccaacaaggccatgccttctgccggaatgctgccttggctgcagggcatcttctgcaacgtgaacaacccctgctttcagagccccacacctggcgaaagccctggcatcgtgtccaactacaacaacagcatcctggccagagtgtaccgggacttccaagagctgctgatgaacgcccctgagtctcagcacctgggcagaatctggaccgagctgcacatcctgagccagttcatggacaccctgagaacacaccccgagagaatcgccggcaggggcatcagaatccgggacatcctgaaggacgaggaaaccctgacactgttcctcatcaagaacatcggcctgagcgacagcgtggtgtacctgctgatcaacagccaagtgcggcccgagcagtttgctcatggcgtgccagatctcgccctgaaggatatcgcctgttctgaggccctgctggaacggttcatcatcttcagccagcggagaggcgccaagaccgtcagatatgccctgtgcagtctgagccagggaaccctgcagtggatcgaggataccctgtacgccaacgtggacttcttcaagctgttccgggtgctgcccacactgctggattctagatcccagggcatcaacctgagaagctggggcggcatcctgtccgacatgagcccaagaatccaagagttcatccaccggcctagcatgcaggacctgctgtgggttaccagacctctgatgcagaacggcggacccgagacattcaccaagctgatgggcattctgagcgatctgctgtgcggctaccctgaaggcggaggatctagagtgctgagcttcaattggtacgaggacaacaactacaaggccttcctgggcatcgactccaccagaaaggaccccatctacagctacgaccggcggacaaccagcttctgcaatgccctgatccagagcctggaaagcaaccctctgaccaagatcgcttggagggccgccaaacctctgctgatgggaaagatcctgtacacccctgacagccctgccgccagaagaatcctgaagaacgccaacagcaccttcgaggaactggaacacgtgcgcaagctggtcaaggcctgggaagaagtgggacctcagatctggtacttcttcgacaatagcacccagatgaacatgatcagagacaccctgggcaaccctaccgtgaaggacttcctgaacagacagctgggcgaagagggcattaccgccgaggccatcctgaactttctgtacaagggccccagagagtcccaggccgacgacatggccaacttcgattggcgggacatcttcaacatcaccgacagaaccctgcggctggtcaaccagtacctggaatgcctggtgctggacaagttcgagagctacaacgacgagacacagctgacccagagagccctgtctctgctggaagagaatatgttctgggctggcgtggtgttccccgacatgtacccttggacaagcagcctgcctcctcacgtgaagtacaagatccggatggacatcgacgtggtcgaaaagaccaacaagatcaaggaccggtactgggacagcggccctagagctgatcccgtggaagattttcggtacatctggggcggattcgcatacctgcaggacatggtggaacagggaatcacacggtcccaggtgcaggctgaagctcctgtgggaatctacctgcagcagatgccttatccttgcttcgtggacgacagcttcatgatcatcctgaatcggtgcttccccatcttcatggtgctggcctggatctactccgtgtctatgaccgtgaagtccatcgtgctggaaaaagagctgcggctgaaagagacactgaagaaccagggcgtgtccaatgccgtgatctggtgcacctggtttctggacagcttctccattatgagcatgagcatctttctgctgacgatcttcatcatgcacggccgcatcctgcactacagcgacccctttatcctcttcctgttcctgctggccttcagcaccgctacaatcatgctgtgttttctgctgtccaccttcttcagcaaggcctctctggccgctgcttgtagcggcgtgatctacttcaccctgtacctgcctcacatcctgtgcttcgcatggcaggacagaatgaccgccgagctgaagaaagctgtgtccctgctgagccctgtggcctttggctttggcaccgagtacctcgtcagatttgaggaacaaggactgggactgcagtggtccaacatcggcaatagccctacagagggcgacgagttcagcttcctgctgtctatgcagatgatgctgctggacgccgccgtgtatggactgctggcttggtatctggaccaggtgttcccaggcgattacggcactcctctgccttggtatttcctgctgcaagagagctactggctcggcggcgagggatgtagcaccagagaagaaagagccctggaaaagaccgagcctctgaccgaggaaacagaggaccctgaacacccagagggcatccacgatagctttttcgagagagaacaccccggctgggtgccaggcgtgtgtgtgaagaatctggtcaagatcttcgagccctgcggcagacctgccgtggacagactgaacatcaccttctacgagaaccagattaccgcctttctgggccacaacggcgctggcaagacaaccacactgagcatcctcacaggcctgctgcctccaacaagcggcacagttctcgttggcggcagagacatcgagacaagcctggatgccgtcagacagtccctgggcatgtgccctcagcacaacatcctgtttcaccacctgaccgtggccgagcacatgctgttttatgcccagctgaagggcaagagccaagaagaggctcagctggaaatggaagccatgctcgaggacaccggcctgcaccacaagagaaatgaggaagcccaggatctgagcggcggcatgcagagaaaactgagcgtggccattgccttcgtgggcgacgccaaggttgtgatcctggatgagcctacaagcggcgtggacccttacagcagaagatccatctgggatctgctgctgaagtacagaagcggccggaccatcatcatgagcacccaccacatggacgaggccgatctgctcggagacagaatcgccatcattgctcagggcagactgtactgcagcggcaccccactgtttctgaagaactgtttcggcaccggactgtatctgaccctcgtgcggaagatgaagaacatccagtctcagcggaagggcagcgagggcacctgtagctgttctagcaagggctttagcaccacctgtccagctcacgtggacgatctgacccctgaacaggtgctggatggcgacgtgaacgagctgatggacgtggtgctgcaccatgtgcctgaggccaagctggtggaatgcatcggccaagaactgatttttctgctcccgaacaagaacttcaagcaccgggcctacgccagcctgttcagagagctggaagaaaccctggccgacctgggcctgtctagctttggcatcagcgacacccctctcgaagagatcttcctgaaagtgacagaggacagcgatagcggccctctgtttgctggcggagcacagcaaaagcgcgagaacgtgaaccctagacacccctgtctgggcccaagagagaaagccggacagacccctcaggacagcaatgtgtgctctcctggtgctcctgccgctcatcctgagggacaacctccacctgaacctgagtgtcctggacctcagctgaacaccggaacacagctggttctgcagcacgtgcaggctctgctcgtgaagagattccagcacaccatcagaagccacaaggactttctggcccagatcgtgctgcccgccacctttgtttttctggctctgatgctgagcatcgtgatccctccattcggcgagtaccccgctctgacactgcacccttggatctacggccagcagtacacattcttctccatggacgaacccggcagcgagcagttcacagtgctggctgatgtcctgctgaacaagcccggcttcggcaaccggtgtctgaaagaaggatggctgcctgagtacccttgcggcaacagcacaccttggaaaacccctagcgtgtcccctaacatcacccagctgttccaaaagcagaaatggacccaagtgaacccctctccatcctgccggtgctccacaagggaaaagctgaccatgctgcccgagtgtccagaaggcgctggcggacttcctccacctcagagaacacagagatccaccgagattctccaggacctgaccgaccggaatatcagcgacttcctggttaagacataccccgcactgatccggtccagcctgaagtccaagttctgggtcaacgaacagagatacggcggcatcagcatcggcggaaaactgcctgtggtgcctatcacaggcgaggcccttgtgggctttctgtccgatctggggagaatcatgaacgtgtccggcggacctatcaccagggaagccagcaaagagatccccgatttcctgaagcacctggaaaccgaggacaatatcaaagtgtggttcaacaacaaaggatggcacgccctcgtgtcttttctgaacgtggcccacaatgccatcctgcgggctagcctgcctaaggacagaagccctgaggaatacggcatcaccgtgatctcccagcctctgaatctgaccaaagagcagctgagcgagatcaccgtgctgaccacctctgtggatgctgtggtggccatctgcgtgatcttcagcatgagcttcgtgcccgcctccttcgtgctgtacctgattcaagagagagtgaacaagagcaagcacctccagttcatctccggggtgtccccaaccacctactgggtcaccaattttctgtgggacatcatgaactacagcgtgtcagccggcctggtcgtgggcatctttatcggctttcagaagaaggcctacacgagccccgagaacctgcctgctttggttgctctgctgctcctgtatggctgggccgtgattcccatgatgtaccccgccagctttctgtttgacgtgcccagcacagcctacgtggccctgtcttgcgccaatctgttcatcggcatcaacagcagcgccatcacattcatcctggaactgttcgagaacaacaggaccctgctgcggttcaacgccgtgctgcggaaactgctgatcgtgttccctcacttctgtctcggcagaggcctgatcgacctggctctgtctcaggccgtgaccgatgtgtacgccagatttggcgaggaacactccgccaatccattccactgggacctgatcggcaagaacctgttcgccatggtggtggaaggcgtcgtgtacttcctgctcactctgctggtgcagagacacttctttctgtctcaatggatcgccgagcctaccaaagaacccattgtggacgaggacgacgatgtggccgaggaaagacagagaatcatcaccggcggcaacaagaccgatatcctgagactgcacgagctgacaaagatctaccccggcacaagctccccagccgtggataggctttgtgtgggagttagacccggcgagtgctttggcctgctgggagttaatggcgccggaaagaccaccaccttcaagatgctgaccggcgacaccacagtgacaagcggagatgctacagtggccggcaagagcatcctgaccaacatcagcgaagtgcatcagaacatgggctactgccctcagttcgacgccatcgacgaactgctgacaggccgcgaacacctgtatctgtatgccagactgagaggcgtgcccgctgaagagatcgagaaggtggccaactggtccatcaagtctctgggcctgacagtgtacgccgactgtctggccggaacatacagcggaggaaacaagcggaagctgagcaccgccattgctctgatcggatgcccacctctggtcctgctggatgaacccacaactggaatggaccctcaggccagacggatgctctggaacgtgatcgtgtctatcatccgcgagggcagagctgtggtgctgacctctcacagcatggaagagtgcgaggctctgtgtacccggctggccattatggtcaagggcgccttcagatgcatgggcaccattcagcatctgaaaagcaagttcggcgacggctacatcgtgacaatgaagatcaagagccccaaggacgacctcctgcctgatctgaaccccgtggaacaattcttccagggcaacttccctggcagcgtgcagcgggaaagacactataacatgctgcagtttcaggtgtcctcctccagcctggctcggatctttcaactgctgctctctcacaaggacagcctgctgattgaagagtacagcgtgacacagaccacactcgaccaggttttcgtgaacttcgccaagcagcagaccgagagccacgacctgcctctgcatcctagagccgctggtgcctctagacaagctcaggactaa

SEQ ID NO: 738 - DNA, 7440 bp, synthetic construct
  source 1..7440: mol_type = other DNA
atgccgcctaacatcaactggaaagaaatcatgaaggtggaccccgacgacctgcctcggcaagaagaactggccgacaacctgctgatctccctgagcaaggtggaagtgaacgagctgaagtccgagaagcaagagaacgtgatccacctgttccggatcacccagagcctgatgaagatgaaggcccaagaggtggaactggccctggaagaagtggaaaaggccggcgaggaacaggccaagttcgagaaccagctgaaaacgaaagtgatgaagctcgagaacgaactcgagatggcccagcagtctgccggcggaagagataccagattcctgcggaacgagatctgccagctggaaaagcagctggaacagaaggaccgcgagctggaagatatggaaaaagagctggaaaaagaaaagaaagtcaacgagcagctggccctgagaaacgaggaagccgaaaacgagaacagcaagctgcggagagagaacaagcggctgaagaagaaaaacgaacagctgtgccaggacatcatcgactaccagaagcagatcgacagccagaaagagacactgctgagcagaagaggcgaggacagcgactacagatcccagctgtccaagaagaattacgagctgatccagtacctggacgagatccagacactgaccgaggccaacgagaagatcgaggtgcagaatcaagagatgcggaagaacctggaagagtccgtgcaagagatggaaaagatgaccgacgagtacaaccgcatgaaggccatcgtgcaccagaccgacaacgtgatcgaccagctcaagaaagaaaacgaccactaccagctgcaggtccaagagctgaccgacctgctgaagtctaagaacgaagaggacgaccccatcatggtggccgtgaacgccaaagtcgaggaatggaagctgatcctgagcagcaaggacgacgagatcatcgagtatcagcagatgctgcacaacctgcgcgagaagctgaagaacgcccagctggatgccgacaagtccaacgtgatggctctgcagcagggcatccaagagagagactcccagatcaagatgctgacagagcaggtcgagcagtacaccaaagaaatggaaaagaatacctgcatcatcgaggacctgaagaatgagctgcagcggaacaagggcgccagcacactgtctcagcagacccacatgaagatccagagcaccctggacatcctgaaagagaaaacaaaagaggccgagagaaccgccgagctggccgaagctgatgccagagagaaagacaaagaactggtggaagccctgaagcgcctgaaggattacgagtctggcgtgtacggcctggaagatgccgtggtggaaatcaagaactgcaagaaccagattaagatccgcgaccgcgagatcgagatcctgaccaaagagatcaacaagctggaactcaagatcagcgacttcctggatgagaacgaggccctgcgggaaagagttggcctggaacctaagaccatgatcgacctgaccgagttcagaaactccaagcacctgaagcagcagcagtaccgggccgagaatcagatcctgctgaaagaaattgagagcctcgaggaagagaggctggatctgaagaaaaagatccggcagatggcacaagagcggggcaagagatctgctaccagcggcctgacaaccgaggatctgaatctgaccgagaacatcagccagggcgacagaatcagcgagcggaaactggatctgctgagcctgaagaacatgagcgaggcccagagcaagaacgagttcctgagccgggaactgatcgagaaagagcgggacctcgagcggagcagaacagtgatcgccaagtttcagaacaagctcaaagaactcgtcgaggaaaacaagcagctcgaagagggcatgaaggaaatcctccaggccatcaaagagatgcagaaagaccccgatgtgaaaggcggcgagacaagcctgatcatccccagcctggaaagactggtcaacgccatcgagtccaagaacgccgagggcatctttgacgccagcctgcatctgaaagcccaggtggaccagctgaccggcagaaatgaggaactgcggcaagaactgagagagagccggaaagaggccattaactacagccagcagctcgccaaggccaatctgaagatcgaccacttggagaaagaaaccagcctgctgaggcagagcgagggcagcaatgtggtgttcaagggcatcgatctgcccgacggaatcgccccttctagcgccagcatcatcaatagccagaatgagtacctgatccatctgctgcaagagcttgagaacaaagagaagaagcttaagaatctcgaggactccctcgaggattacaaccggaagttcgccgtgatccggcaccagcagagcctgctgtacaaagagtacctgtccgaaaaagaaacctggaaaaccgagagcaagacgatcaaagaggaaaagcgcaagctcgaggaccaggtgcagcaggacgctatcaaagtgaaagagtacaacaacctcctgaacgccctgcagatggactccgacgagatgaagaagatcctggccgagaactcccggaagatcaccgtgctgcaagtgaatgagaagtccctgatccgccagtacacaaccctggtggaactcgagcggcagctgcgcaaagagaacgagaaacagaaaaatgaactcctgagcatggaagcagaagtgtgcgagaagattggctgcctgcagcggtttaaagagatggccattttcaagatcgccgctctgcagaaagtggtggacaacagcgtgtccctgagcgaactggaactcgccaacaagcagtacaacgaactgaccgccaagtaccgcgacatcctgcaaaaggacaacatgctggtgcagcggaccagcaacctggaacacctggaatgcgagaacatttccctgaaagaacaggttgagagcatcaacaaagagttggagatcaccaaagagaagctgcacaccatcgagcaggcctgggagcaagagacaaagctgggcaacgagagcagcatggacaaggccaagaagtccatcaccaacagcgacatcgtgtccatcagcaagaaaatcaccatgctggaaatgaaggaattgaacgagagacagcgggccgagcactgccagaagatgtacgagcacctgaggaccagcctgaaacagatggaagagagaaacttcgaactcgaaacgaagtttgccgagctgaccaagatcaacctggacgcccagaaagtcgaacagatgctgagagatgagctggctgactccgtgtccaaggccgtgtctgatgccgatagacagagaatcctggaacttgagaagaacgagatggaactgaaggtcgaggtgtccaagctgagggaaatctccgatatcgcccgcagacaggtggaaattctgaatgcccagcagcagagcagggacaaagaggtcgagtccctgaggatgcagctgctggattatcaggcccagtctgacgagaaatctctgattgccaagctgcatcagcacaatgtgtctctgcagctgtccgaggccacagctctgggaaagctggaatccatcacctctaagctgcagaagatggaagcctacaacctgagactcgagcagaagctggacgaaaaagagcaggccctgtactacgcccggctggaaggcagaaaccgggccaaacatctgcggcagaccatccagtctctgcggaggcaattttcaggcgccctgcctctggctcaacaagagaagttcagcaagacaatgatccagctccagaacgacaagctgaaaatcatgcaagaaatgaagaatagccagcaagagcaccggaacatggaaaacaagaccctggaaatggaactcaaactgaagggcctcgaagaactgatcagcaccctgaaggacacaaagggcgctcagaaagtgatcaactggcatatgaagattgaggaactccgcctccaagaactcaagctcaacagagagctggtcaaggacaaagaagagattaagtacctgaacaacatcatcagcgagtacgagcggaccatcagttctctggaagaggaaatcgtgcagcagaacaaattccacgaggaacgccagatggcttgggaccagagagaggtggacctcgaaagacagctggacatcttcgacagacagcagaatgagattctgaacgccgctcagaagttcgaagaggccaccggctctatccccgatccttctctgcctctgcctaaccagctcgagatcgccctgcggaaaatcaaagaaaacatccggatcatcctggaaacccgggccacatgcaagtcactggaagagaaactcaaagagaaagaatctgccctgcggctggccgagcagaatatcctgtctcgggacaaagtgattaacgagctgcgcctgagactgcctgccacagccgagagggaaaagctgattgccgaactgggccgcaaagagatggaacccaagagccaccacacactgaagattgcccaccagacaatcgccaatatgcaggcccggctgaaccagaaagaagaggtgctgaagaaatatcagcggctgctcgagaaggcccgggaagaacagcgggaaattgtgaagaagcacgaggaagatctgcacatcctccaccacagactggaactgcaggccgacagcagcctgaacaagttcaagcagacagcctgggacctcatgaagcagagccctacacctgtgcctacaaacaagcacttcatccggctggctgagatggaacagaccgtggccgaacaggacgatagcctgtctagcctgctggtcaaactcaagaaggtgtcccaggacctggaacggcagagagagatcacagaactgaaagtcaaagagttcgaaaacatcaagctccagcttcaagagaaccacgaggacgaagtgaagaaagtgaaggccgaggtcgaagatctgaagtacctgctggaccagagtcagaaagaaagccaatgcctgaaaagcgagctgcaagcacagaaagaggctaacagcagggcccctaccaccaccatgagaaatctggtggaaaggctcaagtcccagctggctcttaaagagaaacagcagaaggccctgtctagagccctgctcgagctgagagccgaaatgacagccgccgctgaggaaagaatcatctccgccaccagccaaaaagaagcccacctgaacgtccagcaaatcgtggacagacacaccagggaactgaaaacacaggtcgaggatctcaacgagaatctgctgaagctgaaagaggcactcaagaccagcaagaacagggaaaactccctgaccgacaatctgaacgacctcaacaatgagcttcagaagaagcaaaaggcctacaacaagatcctccgagaaaaagaagaaatcgaccaagagaatgacgaactgaagcggcagatcaaacggctgaccagcggactgcaaggcaagcccctgacagataacaaacagtctctgatcgaggaacttcagcggaaagtcaagaaactcgaaaaccagcttgagggcaaagttgaggaagtcgacctgaagcctatgaaggaaaagaacgctaaagaggaactcatccgctgggaagagggaaagaagtggcaggccaagattgaaggcatccgcaacaaactgaaagaaaaagagggcgaagtctttaccctgaccaagcagctgaatactctgaaggacctgtttgccaaggccgacaaagaaaaactgaccctgcagaggaagctcaagacaaccggcatgaccgtggaccaggttctgggaatcagagccctggaatctgagaaagaacttgaagaacttaaaaagcggaaccttgacctcgagaatgacatcctgtacatgcgggcccatcaggccctgccaagagatagtgtggttgaggacctgcacctccagaacagatacctgcaagaaaagctgcatgccctcgagaagcagttctccaaggacacctacagcaagcccagcatcagcggcatcgagagcgacgaccactgtcagagggaacaagaactccaaaaagagaatctgaagctgtccagcgagaatatcgagcttaagtttcagttggagcaggccaacaaggatctgcccagactgaagaatcaagtgcgggacttgaaagagatgtgcgagttcctgaagaaagaaaaggccgaagtgcagcggaagctgggacatgttcgaggcagtggcagaagcggcaagaccattcctgaactggaaaagaccatcgggctgatgaagaaagtcgtggaaaaggtgcagcgcgagaatgagcagctcaaaaaggcctccggcatcctgacctctgagaagatggccaacatcgaacaagaaaatgagaaacttaaagccgagcttgaaaagctcaaggctcacctgggacatcagctgagcatgcactacgagtctaagaccaagggcaccgagaaaatcattgccgagaatgaacggctgcggaaagagcttaagaaagagactgacgccgccgagaagctgcggatcgccaagaacaatctggaaatcctgaacgaaaagatgacggtgcagctggaagagacaggcaagagactgcagttcgccgagtctagaggcccacaactggaaggcgccgatagcaagtcttggaagtctatcgtggtcacccggatgtacgaaacaaagcttaaagaattggagacagacattgccaagaaaaaccagagcatcaccgacctcaaacagctcgtgaaagaagccaccgagcgggaacagaaagttaacaagtacaatgaggaccttgagcaacagatcaaaatcctcaagcacgtgcccgagggcgccgaaacagagcaaggactgaaacgggaactccaggtgctgagactggccaaccaccaactggacaaagagaaggccgagctgattcaccagatcgaggccaacaaagaccagtctggcgccgagagcacaatccccgatgccgaccaattgaaagagaagatcaaggacctcgagactcagctgaagatgagcgacctggaaaaacagcacctgaaagaagagatcaagaaactgaagaaagaactcgagaacttcgaccccagcttctttgaagagatagaggacctcaagtacaactacaaagaggaagttaagaagaacatcctgttggaggaaaaagtgaaaaagctgagcgagcagctcggagtggaactgacatctcctgtggccgccagcgaggaatttgaggatgaagaggaatcccctgtgaacttccccatctactga

SEQ ID NO: 739 - protein, 141 aa, synthetic construct
MWWRLWWLLLLLLLLWPMVWASSSHPIFHRGEFSVCDSVSVWVGDKTTATDIKGKEVMVLGEVNINNSVFKQYFFETKCRDPNPVDSGCRGIDSKHWNSYCTTTHTFVKALTMDGKQAAWRFIRIDTACVCVLSRKAVRRA

SEQ ID NO: 740 - protein, 120 aa, synthetic construct
SSSHPIFHRGEFSVCDSVSVWVGDKTTATDIKGKEVMVLGEVNINNSVFKQYFFETKCRDPNPVDSGCRGIDSKHWNSYCTTTHTFVKALTMDGKQAAWRFIRIDTACVCVLSRKAVRRA

SEQ ID NO: 741 - DNA, 363 bp, synthetic construct
  source 1..363: mol_type = other DNA
tcatcatcccatcccatcttccacaggggcgaattctcggtgtgtgacagtgtcagcgtgtgggttggggataagaccaccgccacagacatcaagggcaaggaggtgatggtgttgggagaggtgaacattaacaacagtgtattcaaacagtacttttttgagaccaagtgccgggacccaaatcccgttgacagcgggtgccggggcattgactcaaagcactggaactcatattgtaccacgactcacacctttgtcaaggcgctgaccatggatggcaagcaggctgcctggcggtttatccggatagatacggcctgtgtgtgtgtgctcagcaggaaggctgtgagaagagcctga

SEQ ID NO: 742 - DNA, 363 bp, Synthetic construct
  source 1..363: mol_type = other DNA
agcagctctcaccccatcttccacagaggcgagttcagcgtgtgcgactccgtgtctgtgtgggtcggagataagaccaccgccaccgacatcaagggcaaagaagtgatggtcctgggcgaagtgaacatcaacaacagcgtgttcaagcagtacttcttcgagacaaagtgcagggaccccaatcctgtggacagcggctgtagaggcatcgacagcaagcactggaactcctactgcaccaccacacacaccttcgtgaaggccctgaccatggatggaaaacaggccgcctggcggttcatcagaatcgataccgcttgcgtgtgcgtgctgagcagaaaagccgtcagaagggcctga

SEQ ID NO: 743 - DNA, 363 bp, synthetic construct
  source 1..363: mol_type = other DNA
tctagctctcaccccatcttccacagaggcgagttcagcgtgtgcgactccgtgtctgtgtgggtcggagataagaccaccgccaccgacatcaagggcaaagaagtgatggtcctgggcgaagtgaacatcaacaacagcgtgttcaagcagtacttcttcgagacaaagtgcagggaccccaatcctgtggacagcggctgtagaggcatcgacagcaagcactggaacagctactgcaccaccacacacaccttcgtgaaggccctgaccatggatggaaaacaggccgcctggcggttcatcagaatcgataccgcttgcgtgtgcgtgctgagcagaaaagctgtgcggagagcctga

1.-81. (canceled)

82.-101. (canceled)

102. A pharmaceutical composition comprising:
(a) a replication defective herpes simplex virus comprising a recombinant herpes simplex virus genome, wherein the recombinant herpes simplex virus genome comprises a polynucleotide encoding a beta-nerve growth factor (bNGF) polypeptide; and
(b) a pharmaceutically acceptable excipient.

103. The pharmaceutical composition of claim 102, wherein the recombinant herpes simplex virus genome is a recombinant herpes simplex virus type 1 (HSV-1) genome or a recombinant herpes simplex virus type 2 (HSV-2) genome.

104. The pharmaceutical composition of claim 102, wherein the recombinant herpes simplex virus genome comprises an inactivating mutation in a herpes simplex virus gene selected from the group consisting of Infected Cell Protein (ICP) 0, ICP4, ICP22, ICP27, ICP47, thymidine kinase (tk), Long Unique Region (UL) 41, and UL55.

105. The pharmaceutical composition of claim 102, wherein the recombinant herpes simplex virus genome comprises an inactivating mutation in one or both copies of the ICP4 gene.

106. The pharmaceutical composition of claim 102, wherein the bNGF comprises a sequence having at least 80%, at least 85%, at least 90%, at least 91%, at least 92%, at least 93%, at least 94%, at least 95%, at least 96%, at least 97%, at least 98%, at least 99%, or 100% sequence identity to the amino acid sequence of SEQ ID NO: 363, SEQ ID NO: 739, or SEQ ID NO: 740.

107. The pharmaceutical composition of claim 102, wherein the pharmaceutical composition is suitable for ocular, subretinal, intraocular, intravitreal, intracameral, topical, subcutaneous, subconjunctival, subtenon, subtenon capsule, intracameral, retrobulbar, systemic, parenteral, periocular, juxtascleral, anterior juxtascleral, posterior juxtascleral, oral, peribulbar, or suprachoroidal administration.

108. A method of providing prophylactic, palliative, or therapeutic relief of one or more signs or symptoms of an eye condition or disease in a subject in need thereof, the method comprising administering to the subject an effective amount of a pharmaceutical composition comprising:
(a) a replication defective herpes simplex virus comprising a recombinant herpes simplex virus genome, wherein the recombinant herpes simplex virus genome comprises a polynucleotide encoding a bNGF polypeptide; and
(b) a pharmaceutically acceptable excipient.

109. The method of claim 108, wherein the pharmaceutical composition is administered via injection, via injection to the eye, via subretinal injection, via intraocular injection, via intravitreal injection, via suprachoroidal injection, via intracameral injection, intraocularly, intravitreally, topically, subcutaneously, subconjunctivally, subtenonly, intracamerally, retrobulbarly, systemically, parenterally, periocularly, juxtasclerally, anterior juxtasclerally, posterior juxtasclerally, orally, peribulbarly, or suprachoroidally to the subject.

110. The method of claim 108, wherein the pharmaceutical composition is administered topically to the subject.

111. The method of claim 108, wherein the eye condition or disease is neurotrophic keratitis, diabetic retinopathy, dry eye disease, or retinitis pigmentosum.

112. The method of claim 108, wherein the eye condition or disease is neurotrophic keratitis.

113. The method of claim 108, wherein the recombinant herpes simplex virus genome is a recombinant HSV-1 genome or a recombinant HSV-2 genome.

114. The method of claim 108, wherein the recombinant herpes simplex virus genome comprises an inactivating mutation in a herpes simplex virus gene selected from the group consisting of ICP0, ICP4, ICP22, ICP27, ICP47, tk, UL41, and UL55.

115. The method of claim 108, wherein the recombinant herpes simplex virus genome comprises an inactivating mutation in one or both copies of the ICP4 gene.

116. The method of claim 108, wherein the bNGF comprises a sequence having at least 80%, at least 85%, at least 90%, at least 91%, at least 92%, at least 93%, at least 94%, at least 95%, at least 96%, at least 97%, at least 98%, at least 99%, or 100% sequence identity to the amino acid sequence of SEQ ID NO: 363, SEQ ID NO: 739, or SEQ ID NO: 740.

117. A pharmaceutical composition comprising:
(a) a replication defective herpes simplex virus comprising a recombinant herpes simplex virus genome, wherein the recombinant herpes simplex virus genome comprises a polynucleotide encoding a retinal-specific phospholipid-transporting ATPase polypeptide; and
(b) a pharmaceutically acceptable excipient.

118. The pharmaceutical composition of claim 117, wherein the recombinant herpes simplex virus genome is a recombinant HSV-1 genome or a recombinant HSV-2 genome.

119. The pharmaceutical composition of claim 117, wherein the recombinant herpes simplex virus genome comprises an inactivating mutation in a herpes simplex virus gene selected from the group consisting of ICP0, ICP4, ICP22, ICP27, ICP47, tk, UL41, and UL55.

120. The pharmaceutical composition of claim 117, wherein the recombinant herpes simplex virus genome comprises an inactivating mutation in one or both copies of the ICP4 gene.

121. The pharmaceutical composition of claim 117, wherein the retinal-specific phospholipid-transporting ATPase comprises a sequence having at least 80%, at least 85%, at least 90%, at least 91%, at least 92%, at least 93%, at least 94%, at least 95%, at least 96%, at least 97%, at least 98%, at least 99%, or 100% sequence identity to the amino acid sequence of SEQ ID NO: 33.

122. The pharmaceutical composition of claim 117, wherein the pharmaceutical composition is suitable for ocular, subretinal, intraocular, intravitreal, intracameral, topical, subcutaneous, subconjunctival, subtenon, subtenon capsule, intracameral, retrobulbar, systemic, parenteral, periocular, juxtascleral, anterior juxtascleral, posterior juxtascleral, oral, peribulbar, or suprachoroidal administration.

123. A method of providing prophylactic, palliative, or therapeutic relief of one or more signs or symptoms of an eye condition or disease in a subject in need thereof, the method comprising administering to the subject an effective amount of a pharmaceutical composition comprising:
(a) a replication defective herpes simplex virus comprising a recombinant herpes simplex virus genome, wherein the recombinant herpes simplex virus genome comprises a polynucleotide encoding a retinal-specific phospholipid-transporting ATPase polypeptide; and
(b) a pharmaceutically acceptable excipient.

124. The method of claim 123, wherein the pharmaceutical composition is administered via injection, via injection to the eye, via subretinal injection, via intraocular injection, via intravitreal injection, via suprachoroidal injection, via intracameral injection, intraocularly, intravitreally, topically, subcutaneously, subconjunctivally, subtenonly, intracamerally, retrobulbarly, systemically, parenterally, periocularly, juxtasclerally, anterior juxtasclerally, posterior juxtasclerally, orally, peribulbarly, or suprachoroidally to the subject.

125. The method of claim 123, wherein the pharmaceutical composition is administered suprachoroidally to the subject.

126. The method of claim 123, wherein the eye condition or disease is Stargardt disease.

127. The method of claim 123, wherein the recombinant herpes simplex virus genome is a recombinant HSV-1 genome or a recombinant HSV-2 genome.

128. The method of claim 123, wherein the recombinant herpes simplex virus genome comprises an inactivating mutation in a herpes simplex virus gene selected from the group consisting of ICP0, ICP4, ICP22, ICP27, ICP47, tk, UL41, and UL55.

129. The method of claim 123, wherein the recombinant herpes simplex virus genome comprises an inactivating mutation in one or both copies of the ICP4 gene.

130. The method of claim 123, wherein the retinal-specific phospholipid-transporting ATPase comprises a sequence having at least 80%, at least 85%, at least 90%, at least 91%, at least 92%, at least 93%, at least 94%, at least 95%, at least 96%, at least 97%, at least 98%, at least 99%, or 100% sequence identity to the amino acid sequence of SEQ ID NO: 33.
